United States Patent Application Publication US 2026/0191916 A1 - sequence listing, part 17

SEQ ID NO: 36 - DNA, 2897466 bp, Faecalimonas umbilicata (residues 1-1,448,733 of 2,897,466)
  source 1..2897466: mol_type = genomic DNA
atgaatattgttgaggaaaattgggaagaaattatacaaaaattaaaaattgaacacagtcttacggacgtttctttcaaaacgtggattcttccactgagagtatataaagtaacaagtaatactgtgtacattcttgtgaatttaaaagcaagtattgactatattaaaaacaaatacctgctgccgtttcaggtatgtattgccgaagttgtcggaaaagaatatgaagtaaaatttatcgccgaaaatgaattcgatccgaaagattttgaggataaaaccgccacaccgaaatcaaaagtaactgtatctcaggctgcaaacctgaatcccaagtatacatttgatacttttgtcgttggtggaaacaacaattttgcacatgctgcatcacttgcagttgcagaatcaccgggtgaagtctataatcccctctttttatatggaggtgtcggacttggaaaaacccatcttatgcactccatcgctcactttattttagaaaatgagccagagaaaaaagtattatatgtaacaagtgaaacgtttacaaatgaactgattgaagcaattaaaaacggaaaaactggcaatgaatccgcaatgactgcttttcgcgaaaaatacagatcgattgacgtccttttaatagatgatatccaatttattatcggaaaagaaagtacacaggaagaattctttcacacatttaatcatcttcacatatccggcaagcagatcattatctccagcgataagcctccaaaagacattgaaacactggaagctcgtctccgctcccgctttgaatgcggcttagtcgcagatatttcctcacctgattatgaaacacgaatggcaattctcaggaaaaaggaagaattggacggactggacaaatacaatattccggatgctgttatgcagtacattgcttctaatgtaaagtcaaatatccgtgagcttgaaggctctttaaacaaattgatcgcattatataagttaaaaaatgcaccgattgatatcaatttggctgcggaagcgctgaaagatatcgtttcaccaaatgaaaacagacaagtcaccccggaattaatcctggatgttgtctcagaacactttaatatttcgatcgctgacttaaaaagcggcaaacgaaacgctgaaatcgcaattccgcgtcaaatagttatgtatttatgccgtactatgaccgatactccactcaaagcaatcggtctgacacttggtggtcgtgatcattctacgatcagccatggagttgataaggttactgctgatatcaaggccagtgacaccttcagcaacaccattgatattattaagaaaaaattaaatccagtttagattgttatttttttaacggctattgtggattgatatgtggaaaaactgtggatagattgttcgttcattgtggataattttttctgtggaaaactcgcttaagttatcccaattttgcgaacgtattatcctttgtttttccacatacttttcgagcgtaaaaatcgctcaaccatagggatttttagggttatccacatatccacagcccctacggcggttacggcggataactttcatatatttactcaaagcaaataccgaaaggagttatacacatgaaaatcatttgcacaaaatcaaatttagtcaaaggtgtcagtattgtctccaaagcagttccttctaaaacaaccatgccaatcttagaatgtatcttaattgatgcaacaacagatacaatcaaattgacagcgaatgatatggaacttggaattgaaactacgattgaaggaaccattcttcaaaaaggaatcattgcattggatgccaagattttttcagaaatcgtaagaaaacttcctgataatgaagtaatcattgaaacaaatagtaatttacagacattgatcacctgcgaaaaagcaaaatttaatatttccggaaaatcaggagaagatttttcttatttaccttatatcgaaaaaaaggattgcatcacactttctgaatttacgctcaaagaagtgattcgtcagacaattttttcaatctctgatatggacagcaacaaactgatgtcgggtgaattgtttgaagtggatcagaatattctgaaagtggtttccctggacggacaccgtatttccattagaaaaatcgaattaaaagaatcttatgagcctagaaaagttgtcgttccaggaaagacacttcaggaaatcagtaaaatcctttctggtgagacagaaagtgaagttactatttattttacaaataatcatatcgtgtttgagttcagcaacaccgttgttgtgtcaagattaatcgaaggagaatatttccgtatcgaccagatgctctcaaacgattatgagacaaaagtgcgaatcaataaaaaagaactgttaagctgtattgatcgtgcaacacttcttgtgaaagaaggagataagaagccgatcattattaatattaccgatgagtctatgcagctgaagatccagtcacagattggttctatgaatgaagagatcatgattaccaaagatggaaaggatctgctgatcggatttaatccgaagtttttgattgatgcgctgcgcgtgatcgatgacgaggaggtcagcctgtacttcatgaatgcaaaagcaccttgctttatcaaagatgaagaacaaagttatatctatctgatccttccagtaaacttcaatgcggctgcataaatatgcaatacaataatgcatatttatgcagaaaaactacgaaacgtattttcaatgtgcgagaggacgaagaaatggaaattattaaattaagagatgagtacattaaattaggacaggcattaaaagcggcaggatttgtagaatctggtgttgatgcgaaatttgttattcaggatggattagtatctgtcaatggggaaatagaagtgcagcgtggaaagaaactttatgctggagatgttgtctcttttgatggacaggagatccgaattgagaaataataaggacagttggtgccggtatggtaattaagtcattaaaattaaaaaactttagaaattatgattttctcagcatcgagtttgaccatgctaccaatatattttatggcgacaatgctcagggtaagacaaatattttagaggcggtctatctgaccggaacaacgaaatctcatagaggtacgaaagatcgggatttgattcaatttggaaatgaagagtctcatattgagacggtgatcgagaaagatgggatcgagtttcaggtggatatgcatctgaagaagaacagtccaaagggaattgcgatcaataagattccaatccgaaaggcaagtgagctgtttggacttgttcatcttgtatttttctctccggaagatctgaatattatcaagaacggacctgccgagcggagaagatttatggatctggaattgtcccagcttgataaagtctatctgagtgatctggcaaattataacagaatcatcaatcagagaaaccgtctgttaaaagactgccagaatcgtgcagaattaaatgagatgctggatttatgggatatgcagctgattcagtatggcagtcggatcatggaaagacgggaaaaatttctggaagaagtaaatgaaataatatctggaattcattataaattgacgggaggccgagaaacgattacaatttcatatgagaaaaacattgggcagatggaattcgagtcggttctgaaaaagaacagggagcgggatattcgaatgaaaagcacctcagcaggaccacacagagatgacatctgttttttgacaaaagatattgatattcgtaaatttggttcccagggacagcagaggacagcagcattatccttgaagctttctgagatagagattgtcagaaagttgatcaaggatacgccggttcttttgttggatgatgtcctgtcagaactggataagaacagacagaattatttattagacagcattcatgacatacagacattgatcacctgcactggtgtcgatgagtttgtaaatcaccgcttttcgataaataaaatatttcatgtaagtaatggagtcgtagtaaaggaaaattaggaggactataatgagtacagaatatggtgcagatcagattcagatattggaaggactggaggccgtcagaaaaagacctggaatgtacattgggagcacatcttccagagggttacatcatcttgtatacgaaattgtagacaatgcggtcgatgaagcactcggcggatattgtgatacgatttttgtatcgatcaacaaagataattcgatcacggttattgacaacggacgtggaattccggttgggatcaatcataaagcaggacttccggcggttgaggtcgtatttaccgtgctgcatgccggaggaaaattcggtggcggaggatacaaggtgtccggtggacttcacggagtgggtgcctcagtagtaaatgccctgtcagtatggctggaagtagagatttacaacgagggcaagatttacaaacagcgctatgagcgcgggaaatctgcctatcagctgaaagtggtaggagaatgcgaagcggacaagaccggaacgaaagttacattcttgccggatgccgagatttttgaagagacagagtttgattataatattttgaagcagagattccgtgagatggcatttcttacgaaaaatctgaagattgttttagcagatgagagaccggaagaacgcatcgagaagacatttcactatgaaggtggaatcaaggaatttgtgcagtatttaaacaaaagcaagactcctctttatgagcagattatttactgtgagggacagaaagacggagttgcagtagaagtggcaatgcaacacaatgattcctatacagacaatacatatgggtttgtaaataacatcactacaccggaaggcggtacacatgttgtcggttttcgaaatgcacttacaaagactttcaatgagtatgcaagaaaaaataagctgttaaaagatagtgaaccaaatctttcgggagaagatatcagagaaggtctgacagcaattatcagcgttaagattcaggatccacagtttgaaggacagacgaagcaaaaacttggaaacagtgaggcaagaggtgcggttgacagtgtactgagtacacagttagagattttccttgaacagaatccgcaggttgccaaagttgtcatcgagaagtctgttctggcacagcgtgcgcgggaagcggccagaaaggcaagagatcttacaagaagaaaatcagccttagagggaatgtcacttccgggaaaacttgcagattgttcagagaaggatgcatccaaatgtgagatttacattgtagagggagattctgcgggtggatcggcaaagactgccagagaccgtgcaactcaggcaattcttccgcttcgaggaaagattctgaatgtagagaaagcaagactagataaaatctatgcaaatgcagaaatcaaagcgatgatcacagcctttggaacgggaattcatgaggattttgatatttcaaaactgcgatatcataagatcattatcatgaccgatgccgacgtggacggcgctcatatcagtacgcttcttctgacatttttatatcggtttatgccggaactgatcaaacaaggatacgtttatctggcgcagcctccgctctataagttggagaaaaacaaaaaagtatggtatgcttacagtgatgaagaattaaataagattcttcaggaagttggaagagatggaaataataagattcagcgttacaaaggtcttggagagatggatgcggaacagctttgggagacaacaatggatccggagcaccgcgtgcttctgcgtgtgacaatggatgaggaatcttcatccgaattagaccttacttttacgacacttatgggagataaagtagagcctagacgagagtttatcgaggagaatgcaaaatacgtgcaaaatcttgatatttaaaggtttttacagcgttgatgaaaatgtatttcaagtaaggagaagacaatggaagataatatttttgataaagttcatgaggttgacctgaaaaagacgatggaagactcttatattgattatgcaatgagcgttattgcctcccgtgcacttccggatgtcagagatggtctgaaaccggtacagagaagaatcctctattccatgattgaactgaacaatggaccggataagccgcatcgtaagtgtgcccgtatcgtcggagatacgatgggtaaatatcacccgcatggagatagttcgatttatggagcgcttgtcaatatggcgcaggagtggtctacaagatatccgcttgtggatggtcatggaaacttcggttcagtcgatggagatggcgctgctgccatgcgttatacagaggccagattaagcaaaatttctatggagctgacagctgatatcaataaagacacagtagatttcacaccaaactttgatgagacggaaaaggagccggcggtacttccggccagatttccaaatctgctggtcaatggtacgtcaggaattgcggttggaatggcgacgaatattccaccgcataatctaagagaagtcattgcagcagtggtaaagattattgatgaccagatagaagaaaacggcgagacgagcatagaagatattttgcaaatcgtcaaagggccggatttcccaactggagcaatgatccttggaacgagaggaatcgaggaggcataccgcaccggaagaggaaaaatccgtgtacgtgcagtgacggatatcgagccgatggcaaatggaaagagccgtatcgttgtcacagaattaccatatatggtgaataaagctcgtctgatcgagaagattgcagagcttgtacgcgataagaagattgacggaattacagatttaagtgatcagtctaaccgagaaggtatgcgtatctgtatcgagctgcgccgggatgtcaatgcaaatgttgttctgaatcagctgtacaaacatacacaattgcaggatacgtttggtgtgatcatgctggcactggtcaacaacgagccgaaagtcatgaacattcttgagatgctgaactattatctcagacatcaggaagaggtcgtgacaagacgtacgaaatatgaactcaataaggcagaagagcgcgcgcatattttggaaggcttgctgatcgcccttgataatattgatgaggttatcagaattattcgtaattccaagaatgcacaggctgcgaaagaaggactgatcgaagcattccagctgacagatgtacaagcacaggcaattgtagatatgcgtctgcgtgcactgaccggtctggaacgggaaaagcttgaaaatgaatataaggagctcatggagcgcattggagaattgagagcaatccttgcagacagaaaacttcttttaggtgtgatcaaggaagaaattcttgtgatcagtggaaaatatggggatgacagaagaacttccattggttttgatgagttagatctttctacagaagacctgattccggagcaggatgttgtgatcacaatgacaaagcttggttatatcaagcggatgacaacagataccttcaagagtcagaaccgcggcggtaaaggaatcaagggaatgcagaccattgaagaagattatgtagaggaattatttatgacctcgacacataactatatcatgttctttaccaataccggacgagtataccggatgaaaggctatgagattccggaggctggaagaactgcaagaggaactgcgatcatcaatttattgcagctcatgccggatgaaaagattactgcgatgattccgatccgtgaatatgaagacgggaaatatctgtttatggcgacgaaaaaaggtcttgtgaagaagacgccaattacagattatgcaaatgtcagaaagacagggcttgctgcgatcacacttcgtgaagatgatgagctgattgaagtaaagatcacagacaatgaaaaagatatcatcatggtaacaaaatacggtcagtgtatccgtttcaaagagcaggatgtaagatcaacgggaagaacttctatgggtgtacgaggaatgaacctgagcgatcgcgatgaagtgatcggaatgcagttacatacccagggagattaccttctgatcgcttctgaaaagggaatgggaaaacgtactgcaattgaagagttcacctgtcagaatcgtggcggaaaaggtgtgaagtgctataagatcacggagaaaaccggaaatgtgatcggagttaaagcagtaaacgaagacaatgaaattatgatcatcaatacagagggaattgtaattcgaatggaatgtgcaggaatttctattcttggtcgtgtcgcatcgggagtgaaactgatcaaccttgactccaatacaaaagttgccagcattgcaaaagtgagagaaactgtcgcagaagaaaatgcagaagaaaaggctgaagtagaagaagcaggttcagaagaaagtcttgaattagaaacaaattagaaaaaatgatggaatcagataccctatgtcacaaatagagtgcatctgcatatgctgaaacaaggcagaacaaggaagcatgcaggaggtaacaagctatggttcagtttatgaatgagacagcagatgcatatgcacagatacgaggagatgccggacattgtaagatcaagggaaatatttatttctttgaaatgtacgggggaacactggttgtggcagaagtggaaggtcttccaaatgcagaaaatgctccaaacgcaaatttctacggattccatattcatgaaggagcattatgtacaggagatgaagaggatccatttgctcagacaaagggacattataatccggaaaatacagtacatccagggcatgcgggggattttcctccattgcttgcaaatgaggggcttgcatggagcgccttttacacagacaggttttacccggaagaagtgattggaagaacagttgtcatccatgggatggcagatgatttccggacacagtcatcaggaaattccggaagtaagatcgcatgcggagagattgtatcggaatagtcgattctagaaagagaatattgggaaaaagagaaggaatatctggatacaggtattccttttctttgtgatgtatactataatcttagatagatgaaaaatttcagaagattcagatcaatgaggaggtccctatgattcgaacaatagatgtcagtgagattacaaaaaatgtaaaagaaatgtgtattgaagctaattattatctttcagatgatatgaagaatgcattgcagacggcagtgagaacagaagagtctccacttggcagacagattttagaacagcttcaggaaaatctggagattgcagcaacagatatgattccaatctgccaggataccggaatggcagttgtatttttagagattggacaagaggtacatctgaccgggggaaatctggaagaggctgtcaatgagggggtacgtcaggggtatgtggaaggatatttgagaaaatctgtggtaaaggatccgattctgagagaaaatacaaaggataacactccagcagttattcattataaaattgtttctggtgatcaagtgaagatcaaagtggcgccgaagggattcggaagtgaaaacatgagtaaagttatgatgttgaagccggcagatggattggaaggggtaaagcaagcgattctcaatatagtggcagaggcaggaccaaatgcgtgcccaccaatggtagtcggtgttggaatcggaggtacttttgaaaaatgtgcgctgatggcaaaggaagcattgacaagggaggttggcgtccattcggaaatcccatatgtgcaagaattagaagaagaaatgctgcagaagatcaaccagcttggcattggaccgggaggattgggaggcgtgatgaccgctcttgcagttaatgtcaacacatatccgactcacattgcagggcttccagtggcggtgaatatctgttgccatgtgaacagacatattgtgagagtgttatagcaaggagagaaagggaggcagtgcagatggaaaaacatatgacggtaccagcaggaaaagatcagctttgccaattaaaagcgggagattatgtatatttgacgggaacaatctatacggcaagggatgctgcgcataaaagaatgaatgaaagccttgatcaaggtgagaagctgccagtgaaactggaagagcaggtgatttattatatgggaccatctccggcaagagaaggaagaccaatcggttcagcaggaccaacaactgcaagcagaatggataagtatgcgccgcggctgttagatctgggtctgggggcaatgattggaaagggaaagcggacacaggaagtgattgatgcgattataagaaacgagtctgtctattttgcggcagtaggaggtgcaggagcactgttatctaaatgtattaaacgctcagaagtagttgcctatgatgaccttggagcagaggcaatccgccgattggaaattgaaaactttcctgtgatcgtcgtaatcgacaaagatggaaataatctctatgagacagcaattgaaaaatacagaaagagaatagaggaaaattaaatgaaacgtattttattaatggtctttaaaaatattttgctggttcctgttatgtggtgtaaattatgctattatgcgggacatgtagaaaaatatacagagcagcaaatttacaaaatgctcaccttcatcgtacttcgtgccaataaaggcggaagagtgacgatcgatgtacatggaaaagagaatataccggagaaagatgggtttatgttctttccaaatcatcagggaatgtatgatgtacttgcaattgtagaggcatgttcacatccattttcagttgtagcaaaaaaagaggtagaaaatgtacagtttttgaaacaggttttcaaatgcatgaaagcatatacaatggaccggagtgatgtcagacaggcaatgaaagtgattactgcagtgagcaaagaagtagaaaatggaaggaactatttgatttttccggaaggaacgaggtcaaaaaatggaaatcatgttcaagaatttaagggcggaagctttaaagcagcgacaaaagcaaaatgtccgattatcccggtggcgttgattgattcctttaaaccatttgatacaaacagcattgaaccagttacagtacaagttcactttttaaaaccgatgttgtatgaagaatacaaggatatgaagacaaatgaaattgcagcagaagtaaagaggcggattgaagaagtaatagagaaaaatacttccgaacagaagtagatcatcagagtcttgcgagaaaaaaagaagaatccagagtttacacagaaggattcttcttttgttatatctatatagaaataaattacagacaaagaaaaatgagagaaaattctagtaaaagataaattacaaaaaagtaaaaaaagttattgacatttgaaaaaagctttagtataatcaattatgcgcttgatacagcgcctatatcgaaaacaaattcggagaaatactcaagaggccgaagaggcgcccctgctaagggtgtaggtcgggcaaccggcgcgagggttcaaatccctctttctccgctttttaaagaaaagaacaaaataaaaagtttaaaaaactttaaaaaactttaaaaagattgttgacaaacacttgagagtgtgatatagttaagaagttgtcgcaataagcgatggcaaaataaaaataaaaaagtgcttgacaagtaagaaacgctgtgataaaataaaacagctgattgcgaaaagcgaaacagaacattgataattaaacaatagacaacacaaccctgaaaatttcgaacaaatgagaaaatttcagaacagacagaaatgtcaacctaaaaacagtaaaagggataggattgctagtagtgattcttgactggaaacaaacacttttaacgagagtttgatcctggctcaggatgaacgctggcggcgtgcttaacacatgcaagtcgaacgaagcgcttgaatggaattcttcggaaggaagctcaagtgactgagtggcggacgggtgagtaacgcgtgggtaacctgcctcatacagggggataacagttagaaatgactgctaataccgcataagcacacgtgatcgcatgatcgagtgtgaaaaactccggtggtatgagatggacccgcgtctgattagctagttggtggggtaatggcccaccaaggcgacgatcagtagccggcctgagagggtgaacggccacattgggactgagacacggcccaaactcctacgggaggcagcagtggggaatattgcacaatgggggaaaccctgatgcagcgacgccgcgtgaaggatgaagtatttcggtatgtaaacttctatcagcagggaagaaaatgacggtacctgactaagaagccccggctaactacgtgccagcagccgcggtaatacgtagggggcaagcgttatccggatttactgggtgtaaagggagcgtagacggcagtgcaagtctgaagtgaaagcccggggctcaaccccgggactgctttggaaactgtgcagctagagtgtcggagaggcaagcggaattcctagtgtagcggtgaaatgcgtagatattaggaggaacaccagtggcgaaggcggcttgctggacgatgactgacgttgaggctcgaaagcgtggggagcaaacaggattagataccctggtagtccacgccgtaaacgatgactactaggtgtcggggagcaaagctcttcggtgccgcagccaacgcaataagtagtccacctggggagtacgttcgcaagaatgaaactcaaaggaattgacggggacccgcacaagcggtggagcatgtggtttaattcgaagcaacgcgaagaaccttacctgctcttgacatccctctgaccgctctttaatcggagctttccttcgggacagaggagacaggtggtgcatggttgtcgtcagctcgtgtcgtgagatgttgggttaagtcccgcaacgagcgcaacccctatcttcagtagccagcggcaaggccgggcactctggagagactgccagggataacctggaggaaggtggggatgacgtcaaatcatcatgccccttatgagcagggctacacacgtgctacaatggcgtaaacaaagggaagcagagtcgtgaggccgagcaaatcccaaaaataacgtctcagttcggattgtagtctgcaactcgactacatgaagctggaatcgctagtaatcgcgaatcagaatgtcgcggtgaatacgttcccgggtcttgtacacaccgcccgtcacaccatgggagtcagtaacgcccgaagtcagtgacccaaccgcaaggagggagctgccgaaggtgggaccgataactggggtgaagtcgtaacaaggtagccgtatcggaaggtgcggctggatcacctcctttctaaggaagaaagaagtaaggattgaaagagtctattgtttagttatgagtgttctgaaaagaacgaaaagcttctggtggcgatgcgctgaggggaaacacccgtacccatcccgaacacgatggttaagacctcagcggccgatggtactgcactggagacggtgtgggagagcaggtggctgccagattacaactaagggcttatagctcagccggttagagcgcacgcctgataagcgtgaggtcggtggttcgagtccacttaagcccatagcttgaaacgaatgtcaagctaaattgaataaaacctatttgggggtatagctcagttgggagagcgcctgccttgcaagcaggaggtcacgagttcgaatctcgttatctccattggattccaaaaggaatctaatgtgtaccttgaaaatcgcatacagaaatgaaatgataagaaaaatatcaagacatccgaggtgatcatggaagcttgcaagagcagaaatgagaactgattcgagaaaacgaataaaaacaacaaactattgccaacgcatatcacgctagatatgtgtagcggagtccatacccgtggacgaagcaagttggttatgctagaaagagcgtatggtggatgccttggcactaagagccgatgaaagacgtgataagctgcgaaaagcttcggggaggagcaaatatccaatgatccggagatatctgaatggggaaacccggcggagcaaacctccgtcatcttaacgccaatacataacgttaagaagggaacccggtgaactgaaacatctaagtagccggaggaagagaaagaaacatcgattctgtgagtagcggcgagcgaaagcggaagagcccaaaccgggatgcgtgcattccggggttcggactgcgtaagtgatgagtgagcctagtagaatggttttgggaaagccagccagagagggtgaaagccccgtacatgaaaggcgagcgagcacggcaggatccagagtaccacgagacacgagaaaccttgtgggaatgagcggggaccaccccgtaaggctaaatactccttagtgaccgatagcgcatagtactgtgaaggaaaggtgaaaaggaccccgggaggggagtgaaagagaacctgaaaccatatgtttacaagctgtggaacatctttatatgatgaaccgcgtactttttgtagaacggtccggcgagttacgctggctggcgaggttaaggactgaaggtctggagccgaagggaaaccaagtctgaatagggcgtgaagtcagtcagagtagacccgaaaccgggtgatctatccatgtccaggttgaagttgccgtaaaaggcaatggaggaccgaacccacatccgttgaaaagggtggggatgaggtgtggataggggagaaattccaatcgaacccggagatagctggttctcctcgaaatagctttagggctagcctcatacgagtcttgcggaggtagagcactgaatttcctagggggcgtcaaagcttaccgaagaatatcaaactccgaatgccgcgtagatgatgtatgggagtcagactatacgagataagttggatagtcgaaagggaaagagcccagaccaccagctaaggtcccaaaatgtgtgttaagtggaaaaggatgtgggatttcgaagacaactaggatgttggctcagaagcagccatacattcaaagagtgcgtaatagctcactagtcgagaggtcctgcgccgaaaatgtccggggctgaaacacactaccgaagctgtggaattgatctgatcaattggtagaggagcattcttaaagggaagaagctgtaccggaaggagcagtggacttttaagaagagagaatgccggaatgagtagcgagaggaaggtgggaatccttccggccgaatatctaaggtttccagagtaaagctgatctgctctgggtaagtcggggcctaaggcgaggtcgaaagacgtagtcgatggacaacaggttgaaattcctgtactatgatataacagaactgtggggacacgtgtggagagcgggagccgggaatggaaagcccggtgcaagcgaagtaggagaggagttggcaaatccgcttctcaatctgaagacgtgatgcggaccgaactgagagtagggaagcccgtgagccatgcgtcaagaaaagccgctattgtttatatcatacccgtaccgtaaaccgacacaggtggatgaggagagaatcctaaggccgacgggagaagcattgttaaggaactcggcaaaatgactccgtaacttcgggagaaggagtgccagtgagaactggccgcagagaattggcccaagcaactgtttagcaaaaacacaggtctatgcaaaaccgaaaggtgaagtatatgggctgacgcctgcccggtgctggaaggttaaggggagaggttagcgtaagcgaagctttgaacttaagccccagtaaacggcggccgtaactataacggtcctaaggtagcgaaattccttgtcgggtaagttccgacccgcacgaaaggcgtaatgatttgggcactgtctcgacaatgcacccggtgaaattgaaataccagtgaagatgctggttacctgcgccaggacggaaagaccccatggagctttactccagcttgatactgggattcggtattgcatgtacaggataggtgggagactgagaagtatttacgccagtagatacagagtcgctgttgggataccacccttgcagtactgggtttctaaccagcagccgtgacccggctgggggacaatgtcaggtggggagtttgactggggcggtcgcctccgaaagggtatcggaggcgctcaaaggttccctcagaatggtcggaaaccattcaaagagtgcaaaggcagaagggagcttgactgcgacaccgacgggtggagcaggtacgaaagtaggacttagtgatccggtggtataaagtgggattgccatcgctcaacggataaaagctaccctggggataacaggcttatcactcccaagagttcacatcgacggagtggtttggcacctcgatgtcggctcatcgcatcctggggctgaagtaggtcccaagggttgggctgttcgcccattaaagcggtacgcgagctgggttcagaacgtcgtgagacagttcggtccctatccggcgtgggcgtaggatatttgagaggagctgcccttagtacgagaggaccggggtggactggccgctggtgtatctgttgcactgccaagtgcatggcagagtagccaagccgggacgggataaacgctgaaggcatctaagcgtgaagcccccctcaagatgagatatcccaacgcaagttgtaagaccccttgaagacgacgaggtagataggacagaggtggaagtgcagtaatgtatggagctgactgttactaatcggtcgagggcataaccaagtggtgataggagaatggatggaagagagaaacttagaaaagtagttgactgtatgtgattttgaaggtacaccaaatagaatggcccggtggctcagttggttagagcgccgccctgtcacggcggaggtcgagggttcgagtcccttccgggtcgcttgtatcgattagatacatttatagtatatgggatcatagctcagctgggagagcatctgccttacaagcagagggtcataggttcgagccctattggtcccataattctaataaaaggcgtaagatttacatgccgacattaattgaatatgccgacatggctcaattggcagagcagctgatttgtaatcagcaggttatcggttcaagtccgattgtcggctttgttaaaagctaatcttagcattttaacttatggatggattcccgagtggccaaagggggcagactgtaaatctgttggcaacgccttcgaaggttcgaatccttctccatccattagctatttaaaataatagctaattttaattttataatatcgcggggtggagcagtctggaagctcgtcgggctcataacccgaaggtcgtaggttcaaatcctgcccccgcaattttttatgcatgtctggtgcgtaaaatcagcccagatagctcagtcggtagagcagaggactgaaaatcctcgtgtcgctggttcgattccggctctgggcactgtcagatataaagcgacaaaaaacagaatatggagcattagctcagtcggtagagcacttgacttttaatcaagttgtccggggttcgaatccccgatgcttcacttaggacaatcactttggtggttgtttttttattatctcacaaaaaaaagatacattttgtaaggaaatagggcaaaatgaaacaaaataaaaatttctcttgcaaacttcagtttagctatgtataatagtttaaaatgcgttgagaacaggaggaatttaatatgtcacagagaaaagatattcataaggtacttattattggatcaggccctattatcattggacaggcgtgtgaatttgactattcaggaacacaggcttgtaaagcacttagaaaccttgggtatgaaattgtattagtgaattctaatccggctacgattatgacagatccggatgttgctgacgttacttatattgaaccactaaatgtggatagaatcgaacaaattattaaaaaggaaagaccagatgctttattaccaaaccttggagggcagtcaggtcttaatttatgctcggaattggcacaggcaggagttttagaaaaatacaatgtcgaagttatcggagttcaggtagatgccattgaacgtggtgaagatagaatcgaatttaagaaaactatggacagccttggaattgagatggcaagaagtgaagttgcatattctgttgatgaagcgcttgcaatcgcagataaattaggttacccggttgttcttcgtccggcatatacgatgggtggagcaggcggaggtcttgtatataatgtagaagaactgaagacagtctgcgctcgtggtctgcaagccagccttgtaggacaagttcttgtagaagaatccattcttggatgggaagagttagaattagaagttgtccgtgatgcaaacaataatatgattacagtatgtttcattgagaatattgatccgcttggagtacataccggagattccttctgtgcagcaccaatgcttactattccggaaaatgtacagaaacgtttacaggagaagtcttataagattgttgaggcaatccaggtaattggtggaactaatgtacagtgggcacatgatccaaagacagatcgtgatatcgtaattgagatcaatccgagaacatctcgttcttctgcacttgcttctaaagcaaccggattcccgatcgctcttgtttctgcaatgcttgctacaggtatgacattagaagatattccttgtggaaaatatggaacattagataagtatgttccagacggggattatgttgtaattaaatttgcacgttgggcttttgaaaaattcaaaggtgtagaagataaattaggaacacagatgcgtgcagtcggtgaagtaatgagcatcggtaagacatacaaagaagcattccagaaagcaatccgaagcttggagacaggtcgctatggacttggacatgcaaaagattttgatcagaaatcaaaagaagaattattaaaaatgctgatcacacctacaagtgaaagacattttattatgtatgaggcactgagaaaaggtgctactgttgatgaaattcatgagatcacaaaagtgaagaaatatttcattgagcagatgaaagaacttgtggaagaggaagaagcacttctgcagcacaaaggaacacttccatcagacgaagcacttactcaggcaaagaaagacggattctcagataaatacctcagccagattttggaaatcaatgaagacgaagtaagaggaagacgtcttgcaatcggagtggaagaaaaatgggaaggtgttcatgtaagcggaacagaagacagcgcatactactactcaacatataatggagaagacaagaatccaatcagcactgagaagcagaaaattatgattctcggtggcggtccaaacagaatcggacagggaattgaattcgattattgctgtgtacatgcttcactggcattaaaacagcttggatttgaaactattattgtaaactgtaatccagagactgtttctacagattatgatacatctgacaaactgtactttgaaccattgacactggaagatgttttaagcatttatgaaaaagaaaaaccggtaggagtgatcgcacagttcggaggtcagacaccactgaaccttgcagcagatctggaaaagaatggagtaaaaattcttggtacagctccatctgtaattgatcttgcagaagatagagatttattccgtgcaatgatggaaaaactggaaattccaatgccggagtcaggaatggcagtcaatgtagaagaagcattagagatcgctgaaaaaatcggatatccggtaatggtacgtccttcttatgtacttggaggaagaggaatggaagttgttcatgatgcagagagcatggttggatacatgaaagctgcagtaggagtaacaccggacagaccaatcttgatcgaccgtttcttaggacatgcaacagaatgtgaagcagatgcaatcagcgatggaacacatgcatttgttccggcagttatggaacacattgagcttgcaggtgtacattcaggagactctgcatgtatcattccttctaaatatatttcagaagagaatgtaaagacaatcaaagaatacactagaaaaatcgcagaagaaatgcatgtgaaaggacttatgaacatgcagtatgcgatcgagaacggaaaagtatatgtattagaggcaaatccgagagcatccagaacagtaccgcttgtatcaaaagtatgtaacatcagaatggtaccgcttgcgatcgacattgtgacatctgaactgacaggaagaccgtcaccggttccgtcattgaaagaacaggatattccttactatggagtaaaagaagctgtattcccatttaacatgttccaggaagtagaccctgtattaggaccagaaatgcgttcaacaggtgaggttttaggactttcaagattctacggggaagcatattataaagcacaggaagctacacagctgaaaatcccgatggaaggaacagttctgatcacagtcaatgacagagataaagcagaagttgctgatgtggcaagacagtttgcagagacaggatttaaaattcttgcttctaagaatacttacaaattacttcagcaggaaggaattgaggcggaacttgtaaataaaatgcaggaaggtcgtccaaacattcttgatttaatcatgaatggaaagatcgatctgattgtcaatacaccaatcggaaagagcgagaatgtagatgacagctatttaagaaaagctgcaattaagaaaaaagttccatatatcacaacaatggcagctgcaaaagcaactgtaagcggtattcagtcaatgaaaaaaccgggctgcggagaagtaaaatctattcaggaattacacagcgagattacagacaaaatgtaaaaaattgttgaaaaagtaaatagaaaagtgagtgaaataaaaactccagtggatgatgtcgcgtacatagatccactggagttttcttctgtagaaagctatttttggaaacggaaatggaatgtgggaaatcttgcttaaagatgaacactttgatacaatgagaaagaaatgcagtctgaaaaagatgcagtttcaggaactagaagatagaaagtatagaatagaaaatatgaagacactttatgatagattagaaacgtatggaaatagtgatttttacgggatgcatatgcctggacataagagaaaccggcagctgattccaaatcggattccttatgaattggatattacggaaattgacggatttgatgatcttcaccatgcagatgggattatcagggaggcggaagcgcgggcagccaggctttacaaagcagagaccacccattttcttgtaaatggaagcacggttggcattctgagtgcgattcttggttccacaaacagaggggacaagattcttgtagcaagaaactgtcataagtctgtttatcatgcgatagatctaaatgaactggaaccgatgtacatttatccgtcgcatgtggaatcgggaatgagtggagaaatttccgcagaagaagtaaaaactttgttggagagggaaccagagatcagagcagtcatgattgtctctccaacatatgacggtgtggtttcagatgttgagaagattgctgagatcgtacatcaatacagcattccgttaatcgtggatgaagcgcatggggcacattttggatttcatccgtatttcccggaaaatgcaaacagaaaaggggcagatgttgttatccacagtgtacataagaccttacctgctctgacacagacagcgctgcttcatctaaatggtccgatcgcagaccggaagaagatcgagcgttaccttcatatattgcagtccagcagtccttcctacattttgatggcgagtattgatgtgtgcatggaatttctggagcaaagcggggaacgggaatttgaaacgtatgtgcaggcgctggaaaaagtcagagagagactgggaagactatgtcacctgaaattaatcgagacagaacagtatgaccggtcgaaactggtaatctctgttcagaacagtacattgtcaagcagagagctttcaaagatactgagagaaaaatatcacctggagatggagatgacagcggggaactatattcttgccatgacttcggttggagatacacgggaaggattggaacggtttgtaagtgcattagaggaaattgatgcagcatgtaaggaatcaaaagagaagcattgtttcggtagtcttccacgaaccagattgtgtttgaaaagttcggaagcagttgaaagaaaaaatggaatcagcatagcatgggaagacagtgtcgggttgatttctatggaatatgcgtatctgtatccgccgggaatcccattgatcgtgcccggcgaagaggtgacttgggaagttatttcctatcttgaacaatatagaaaaaggggattttcaatcgaagggttgacagaggaaggaagaataaaggtgtgcagcgatgagtaagattttttattttatgggcaaaagtgcagcaggaaaagatactatttttcagaaaatacaaaagcttctgacggatctgcggacggtggtaatctatacgacgcgcccgatccgggaaggagaagaagacggtgttgcgtatcattttgtaacggaggagaggatgcgagaacttgaaagagagggaaagatcatcgaacttcgggcatacaatacggtacacggcatctggtactatttcacggcagatgacgggcaattttcaggaaatgaaagttgtgtggcaatcgggacactggagtcttttgaaaaaatgcagaattattttggaaaggaaaatgtaattccaatttatatacaggtagacgatggagttcgattagagagagcgcttgagagggaacgcacgcagaaagaaccaaaatatgcagaactttgcagacggtttcttgcagatgagaaggatttttcggaagaaaatttagaacggcttggaattgtgcagcgttttgaaaatctggatatgggaaaatgtacaaatgaaattatgctatatattcagaaaaatctatgctataataacaacaaagaaactggcagtatctaatgctttcaactaacaatttacacacaaaggacgtgatgatcatgggcggatttaaagatgtaattggacataatgagattattgagtatattcagaatgcggtgaagatggacaaagtttcccatgcatatattatgaacggacagaaaggctccggaaagaagatgcttgcagacttatttgcaaggacacttcagtgcgagggagagggagtagaaccttgtggagaatgtcgttcctgtaagcaggcggatggaaataatcagccagatattatcaaggtgacacatgaaaagccgaattcgatcagtgtcgatgatatccgcacacaggtgaacaacgacattttgattaagccgtacagtagtaaatataagatttatattattccggaggcggataaaatgactgtgcaggcacagaatgctcttttaaaaacaatagaagagccgccgtcttatgcagtgatctttcttctgacagaaaatgcagaagtgcttttaccgacgatccgttcccgttgtgtcatgttaaaactgaggaatatcaaagacaagctgattaagaaatatttgatggaagagatggagattccggactataaagcggatatctgcactgcatttgcacagggaaatatgggacgtgcaatcatgctggcgacttccgaacatttcaatgagatcaaggaagaagcggtgcagcttttaaaatatattaatgatatggaactgtatgagattgtggaggcaattaagaggatcagtaattataagttagatatcacagattatctcgacattatcatgatctggtacagggatattcttctctacaaggcgacaaaagatgtagatggcgttgtatttgctgaccagctgaattatatcaaagaacgggcaagtaaaagttcctatgaaggaattgagaagatcttagacagcatcgagaaggcgaaagcacgtctgaaggcgaatgtaaactttgatcttgtcatggaactgttactgctgacaataaaggagaactagaacaatggcaagagtaatcggggtaagatttcgcacggcagggaagatttattttttttcaccggggaaatttgatgtcaaaagaggaaatcaggtgatcgtagagactgcaagaggaattgagtttgggaatgtagtgacaggaccgaaggatgttccagatgaccagatcatgcagccgctaaagacggtgatccgtatcgcgacagaagaagaccgccgaacggaagaaaagaacagagaaaaagaaaaagaagcatttcagatttgtcttgagaagataagaaaacatggactggagatgaagctgatcaatgcagaatatacatttgataataacaaagtattgttttattttacagccgatggaagaattgacttccgggaactggtaaaagatcttgcagcagtcttccgcacaagaattgaattaagacagatcggggtcagagatgagacaaagatccgcggaggtattggagtctgtggaagaccgctctgttgtcacacctacttgtcagaatttgcaccggtatcgatcaagatggcgaaagagcagaatttgtctctgaatccgacaaagatctccggagtatgcggcaggttaatgtgctgcctgacaaatgagcaggagacctatgaagaattaaacagtcaccttccttctgtaggagatacggtcacgactgtggaaggcctgaaaggggaggttcatagcctgagcgtgttaagacagcttgtgaaggtgatcgtgaagcttgacaacgatgagaaagagatcagagaatataaagtttctgaattgaaatttaaaccaagaaggaagaaaaatgaagtcagactctcgaaagagcagatgagagagctggctgcgcttgagaaaggtacaggagaatcgaagttagatgacaactaatttaaagcaggaagagagattagatgatctccagattcatgggtatgaaatcatccagcatccgggaagattctgctttggcatggatgcagtgctcctttctaattttgctgcagtcaaaaagggagagagcgcgctggatcttggaacaggaacgggaatcattccaatccttctggaagcaaagacagaaggggaacattttactgggctggagatccagaaagaaagtgcggatatggcgcaaagaagtgtggcacacaatcatctggagcagaagataacgattcagacaggcgatatcaaggaggcgggcacgatattttctcccgcttcttttgatgtgatcacaacaaatccgccttacatgttaggagaacatggacttaagaatgaggctgatgcaaagacgattgcccgtcatgaagtgttgtgtacactggatgatattttaagggagagtgcaaaacttctgaaatttaagggaagattttatatggtacacagaccgttccgattgccggaaattcttacgaaaatgtctatgcatggaattgaaccgaagcggatgcggcttgtgcacccatatatcgataaagaaccgaatatggtgctgattgaaggatcaagaggtgggagaccgcggatgaaggtagagccaccgttaatcgtgtacagagagcctggagtttatacagaagaattgcttcagggatacagcatgaaatagtagacataacgttagtggcagcaggctcgctgagaaaaaggaagaagaaaggaaaagtgccatggcaggtattttatatttatgtgcaacaccgatcggaaatctggaagacatgactttccgggcggtaagagtacttggcgaagtggatttgattgctgcagaagatacgagaaacagtattaaactgctcaatcattttgaaatcaagacgccgatgacgagctatcacgaatataataaaattgaaaaaggaaagaaactcgtacagaaacttttggaaggacagaatattgcactcattacagatgcgggtacaccgggaatttcagatccgggagaagagcttgtaaaaatgtgttacgaagccggaatcacagtcacatcacttccgggggcagcggcatgtattacggcattaacaatttccgggcttgccacgagaagattcgcatttgaagcatttcttccgagtgataagaaagagcgccaggaagtcgtaaaggaactggaacaagaggcgagaactatcattttatatgaagctccacacagacttgtgaagaccttaaaggagctggagggagtacttggcaatagaagaatcacggtgtgccgggagttgacaaagaagcatgagactgcatttgtgacaactttaagagaggcgatcgtctattacgaggaaacggatccaaagggagagtgcgtgctcgtagtggaaggaaagagcagagaagagatacgaaaggaagcacaaagtcagtgggagcagatgtcactggaagaccatgtacaatattatatggatcagggaatcgataagaaggaagcgatgaaaaaggtagcaaaggatcgcgggatttccaagagagatgtatataacagcctgatttagaggtgttttgagcaacttgtatactaattcccaaaaagtttgtgcaagtggagcatggaacaagatttgattttcacttatactaatcatatcgaaaaacgaaataagatatgaattggaaagtttaggaggaaatgtaacaatggcaagtttatcattaaaacacattaacaaaacatatccaaatggttttgaagctgtaaaagacttcaaccttgagattgaagataaagaatttatcatctttgtaggtccttcaggatgtggtaaatctacaacacttcgtatgatcgcaggtctggaagaaatcacatccggtgaattgaaaatcggagacaaagtggtaaatgatgtagagccaaaagacagagatattgcgatggtattccagaactatgctttgtacccacatatgacagtatatgataacatggcattcggtctgaaattaagaaaagttccaaaagatgagatcgacagaatggtaaaagaagctgctaagattcttgaccttgaaagcttattagatcgtaaaccgaaggcattatctggtggacaaagacagcgtgttgctatgggtcgtgctatcgttcgtaatccaaaagtattccttatggatgagcctttatcaaaccttgatgcaaaattaagaggacagatgcgtattgagatttctaaattacaccagagattaggtacaacaatcatctacgttactcatgaccagacagaggctatgacacttggtacaagaatcgtagttatgagtgcaggtatcgttcagcaggtagatacaccacaggtattatatgatacaccatgtaacttattcgttgctggattcatcggatcaccacagatgaacttcttagatgcaacatgtaaagtaaatggaaataaagtagctcttgaagttggaggagcagcaatcgaacttccaccagcaaaagcgaaaaaattaatcgaaggcggatatgacggaaaaacagttgtacttggtattcgtccggaagatgttcacgatgagccaatgttcattgcatcttctccaaacacagttatcgaatctaagattcgtgtatatgaaatgttaggtgctgaagtttacttatactttgactatgctggatcaagcatgacagcaagagttgacccaagaacaacagcaagaacaggtgatacagtgaagtttgcattcgatgcagaaaagattcatgtatttgataaagaaacagagtgcacaatcacaaactaatttgtgtatagaaagaatccaacgaatggatgagaaactctgagaaagttggaagtgagcggaactgccacagtatagtaagatgctatgctgtggcagtttttttgttcacagaagattcgttgttcgatgcaggcatgtagatcactgttttgtcagatgaaaaattagattttacagagatttaaaaaagatttttttgataaaatcaagatatcagttataatgaagaagttgtgcaaacaaccaatttataggaaaaaggtaaggaagcaaaacaaatgaatcgaaaatatttattaagaaggatcgcacaggactgtattccaacggtgttttcacttttgatgtccggtctttatggggtgatggatggcttgtttgtcgggcgtgcagttggggatgcaggacttgcggccatcaatatcgcatggccgattgcagcggtgattactgcagtgggaatcggaattggcagtgggggaagtgtgctgtattccaatagcaatgggaagggagaacaagagagaggagaagtggtgtatcatcagaccatcacacttctgtttgcagcagcaatggtattacttattgtgcttggatttacatatcccgctattctaagtgcgctaggagcaaaaggggatgtataccagaaagccgtagagtatattcagattattattttcggcgcagtctttcaggtgatgggaaccggatttattccaatgctccggaatcggaatcttgcgtttcaggcgatggtcagcatggctgccgggatgggagtcaatggggtattgaattatctgttattgtttgttgtaaaaataggaatccggggagcggcagttgggacaattgctgcacagtttgttgtgttggtgatcagttcctatcttatttatggcaggcagaaagtacatctcaaggtagtgtggcaacataagatgatcggggaaattctaaaaataggaatttccgcatttggattgtcgcttgccccgtcgatcgtgctgcttttcacaaatttacagtgtctgaaatatggaggagatgcagcagttgcgtgctatgcggtaatttcctacattgtcttcccagtgcagtctatgctcatgggaattggagatggcacacaaccattgatgagtttttacagtggagcgaaaaaaatggaagaacttcgtttcgtgaaaaaaatcgcatcgattgcagttgtaggaatgggtgctgttttctttgtcatcgtgattttagtatcaaaatatattccggatgtttttggaatgcagatggactcccaggcttattttggaaccgggatggcagtcagtgcggtttcatttttgttcaccggactggcaaagttccatatttcttatttgaatgcgacacttcaggtgaaaaaagcaatgcagcttatttatggtgagacaattgtcgtggcaccatttttgatttttctattaccatatgttttcaaaatcaatggtatctggttatcacttccggggacacagctcataatgctcttaatatttaatgtattctttacaaaaacaggaaagtagattttataaatgccttgtataatgcgtttcggaaaggagaaagttatgaaccgaaagagcattatgcaaaggctgaaacagatgggaggagtttggttgtttgtcataccagccctgatcccgctgatcgttttctggatttatccaatattcaggtctttatttatcagctttaccgattgggattatatgagtcccacatacaattttgtgttttttgacaactttaaatctttgttcaccgatgaacggttctatgaagcactgggaaatacaattctatttagcgtggggacgatcattccgacaattgtcgggggcttgctgcttgccttgctgcttcagaaaaattttagagggagcggaatttataaatttattctattctctccgtgggtaacaccgaccgtagcagtttccattgtgtggacatggatttttgaacctcaagtaggaatggcaaatacagtcttaaaatttttccatttaccgggcttgcagtggattcaaagctcagatacagcgatgctgtccgtaatactggtaacagtttggaagagtcttggttatgcaatgatcttttatttatcagctctggagaaagtgccaaaagatctgtatgaggcgtgtggactggatggggcaaagaaatggcagaggtttcgtgatattacaattccgtgcatttccccaactacgtttttcctcatgatcattacgatggtcaattctcttcaggcatatgaccagattcagattctgacacagggtggaccgtcaggaagtacaagaactttgctgtacatgtattatcaattagggtttgaggaatttaacatgggagaggcgactgcagttgcaatcgtgattattttgatcacagtactgctttcctgtgtgcaatttacggcatcgaaaaaatgggtacattattagaaaggaacagcatggaaggacagaaactattaaatggatatcagacgggacaacagacccgcagacaaggggcagtaatgttcgggccgggcaggaagattataaatagtttactgcatctgttaaaaatggcggtactgcttttggcaagtcttgtgacggcatttccatttgtatggatgattatcagtgcattaaaaacgaaggcggaaattatggatgtcagtgtttttctgccggagactgcacaatggcagaatttctcggaagttttgtttgaatctccaatggtaagatatattggcaacagtttatttgtatctgtatgtacagttgcaattcaagttgtcacaggagcaatgatcgcatatgcgattgtgtttatgaaatttcgaggcagaaaaatgttgtttgctgtaatcatggcgacgtatatgcttccaacagcagcaacgtatgttccaagttatatcattttatctaattggaacttacttaacacttatacaggactgatcatatcaaatgcagtcagcatttttgggattttccttttgcgtcaggcatttatgcaagttccggcaggtctggtggaagcagccaaaatcgatggagcaaatgcatggaaaatcttatggaaaatcgtaacaccaatgacaaaatcgtcatttattacatttgggctgatgagttttatcagtagttacaataattatatgtggccttcgctgatcacggattcaccggagatgagtcttgtctcacagggacttcgcagatattttatcgaaggcggagcttatggaactgaatggccgaaagtaatggcaggaagcacgattatcgttgtgccgcttttaatcttatttatgtttacacagaagtggtttatcaatggaatcggcggcgacacaggaatgaaaggataggaaaatatatgaaattaaagaaaatcatggcaatcgggttaatttgtacaatgacagcatctgcatttgcaggatgtggaggagcaaaaaaagaggagacagcaaagactgaggatggaaaagtaaagattgatttttggtattccggaggaaagactgcagttggagttcttggagatatggtggaagagtttaatgcttcacaggatcaatatgagatcaacagcgtgacacaggcagactatgatgagacatatgaaaaactgcaggcaggaattgcaggaaaaaaagctccggatatggcacttcttgatgtagataaggcgagaaatctttctagaaaagacttggtggcagatattcagccatttgtagacgacgatgaggcgtttgaaaaagaagattatattgaggtattttacaatcagggaatcgatgatggaaagttgtttgcattccctgcatatggaactactcaagtcatgtattacaataaagctgcttttgaagaagcaggtatccaggcagaagacattaagacatggcaggatttggaggcagcggcaaagaaaatgtcaaaaggagaggaattctatggatgggagccgatgtggggatctggaaatatgatcgatgcggcgctcagcaatggagcacaaatcttcagcgaggacaaaacagaagtgctgatcaactccgaagagtgggtagaagtatgggaaagcttccgtaagtggatccatgaagataaaacgatgagaatccattctggcggacaaggatgggaatactggtataaaacaattgatgatgtcctgcaaaataaggcaggaggttatacaggatcttccggagatcaggcagaccttgattttgatattgtagctgcaatggagcagccgggatggggagacaatccatcagcgccggttgcaggagcattacagcttgtaatgttggagggatcttcagaagaagaaaagcaaggggtatatgaatttatgaaattctttactacgccggaaaatcaggcaaagtggtctatgggaacaggttatgttgctgtgcgcaattccacacaggaagtagaggcatttgaagcatatacaaatgaacatccacaggcacttgttccattgcagcaggcagcacatgcatcgatcatgccggaagatccaaccggaggaaaagtaatggatgcattgcgtattgcagcagataaagtagaaattgaaggtatttccgcaaaagaagcattggatgaagcgcagaagaccgcacagaaagcattggatagtgtcaataaataaaacaagcgaggagaaaagtgtgagagaaaaaatttcatttgagataaacaaaaatacagatgggattttagaggcagaggttctgatttcagaacctctggaagtcctttctatcatgttagatgtggaacaagtagaaatgctgatgggatatctgtttcttcaggatgaaagcggaaagacccgattccaaaaattactagggtacagtgagagagtcattcagattgggtcatcttcggaatgtacgaccatcggaggtgttccgggaaaaattggtcagggaagttggaaactgacactttgcatttttaccgaggaggtccggaaatatttgggggcacagacgataccagttacctttgagatcaccggagaaaaaaaggaaattaaggaaagcattggagaagaatgctgggtttccgaagaacaaaaatgccctctgtattatgatcaattttcgtggaatcagaaatttaatggcgaagaaaggtggtataaaggggatttccatacgcatacgagattgtcagatggaaaagaaactgttgcaaatgcaatggagaaggcaaagcagatgcaaatggatttctatgtaccgacggagcacaatgtgattcatacgggatggaagcatacagaagtgatgattgttccgggagttgaggtgactgctgaaaaagggcactgtaatctttttggaattgaccgacttccgtccagaatcaaagaaatcatctgcagaccggcatccgaacaggcagaaacatgggttacggagattttgcaggaagcagcagaaagaggatggcttgtgagcatcaatcatccgtttttacatgtttggaaatggaaatttcattcgattccacttcgtatggttcagtttctggaaattgtaaacgatcctacatatgaatatgcaaaggaatccaatgagaaagcaatccggtttttagatttgctgtggcaggaagggtatcgaatctacggaattgggggaagtgattctcacaatctgatcgaggagagatatgacggggctttagagccatctgtggcaggagatccgggaacgtatgtattcagtaaagggctgacaccgacaaaactgttgcaaaatttgagaaaaggacatatttatgtgagcagatattgcacactggaggtagaaattacagccgatggagaaacctatcttccgggagaacatattcctgttggaacaaaggaagcggtgcgtatacaatatcaggtggtcattcgtggactggaagagtgcccggttgtatatgctgtgatcaaccgtgtcagaatggggatggaacttacggagatagagaagggggtctatgaggcgaagaaagagattctcttttcagcaggagaatatgaatggatgcgtctggatgtccgaaaagaagatggtacattcttaggatatgtcaatccaatttaccatggggcaaaaacaccacagtgcaagacgtttggagagatggttcagaaagcatccgggatgatttagagagaagaggaaacaatggatataaaaggaattttatttgacaaagatgggactttgatagagtttcattcattttgggtgcaggcggcaaaaagagttgtaccagaatttttaactgagaatcagatatcgccggatcagaaacatgcggatgtagtaatggaggcaatgggagttttcggggatgatatagatcccaatggtgcacttgcttataaatccaataaagaaattgcagaggaaattacagaggcacttgcaagtaagggtatttacatagacagcaggaaggcacaggagcagattgtcaggttgtttgaaaaaattgcaacagacagccagatgcagtttcagacatttacagatcttccagaattatttcagcagctaaggaaaagacaaattcgtatcggtattgccacaacagatacgattgcttctacaagacattgtctgagaaaattgcagattgaagacttgatcgattatgttggagccgatgatggggtagcaagaccaaagccggatccggatatgtttgaaacattctgtaaagcatatgggcttgaaccagaagaagttgcagtagtcggagatacttataatgatatgagatttgcgaaaaattgtaaggggaaggcagttggagtgttgagcggtgtcagtaggaaggaagattttcaggatttggcagatgttgtattgccttccgtagcagatattttttctattttggatcaaggagaagagaaagaggagtgtagtgaatggcagagatcactttaaatcatgtatacaaaaaatatgaaggcggtgtgacggctgttcaggactttacactggagattccggataaagaatttgtaatctttgtaggaccttccggatgtggaaaatcgacaacgttacggatgatcgccggattggaatctatttcggagggggaacttctgattgatggtgagcgaatgaacgaggtggagtcctgcaatcggaatattgcaatggtatttcaaagctatgcattgtatcctcacatgaccgtattcgaaaatattgcttacagtatgaagttaaagaaagttccgaaaaaagagatcaaagaacgggtacacgaggtagcacagattttgaagattgaagagattctggatagaaaaccgggacagctttcaggaggacagaagcagagagtggcaatgggacgtgcgatcgtcagacatccgaaagtgtttctgatggatgagccgttgtccaatctcgatgcaaaactccgtacacagatgcggattgagatcatgagactttacaaggaacttcagactacgttcatttatgtgacccatgaccagacagaggcgatgacactcggaacacgcattgtcgtgatgaaagatgggatcatccagcaggtagatacaccgcaacggctgtatgatttccctgcaaatagatttgttgccggatttatcggatcaccacagatgaattttatttcgggaatatgccgtgtgaagaaaacgggtgtctttttggaaactgcagattgtgaagtgcagattatagatggaagaaaagagcggctaagaaatgaagggtatgatggcaagcaagtgacgatgggagtgaggccagagcatgtgaaagtatggagtccagaagaatccgaagtgagtgatctggtgttgcagtcacaggtgagtgtctatgaaatgctgggagcagaggcttatctttattttacttacgaagggcagcaagtgtctgcgagagtgaaagcagatacgaagatccgaaaagaggataaggtattttttggatttgatacaaaagatatgattctgtttgattttgaaacggaagaagcaatttattagagggaagagagaaagagatttttatttcagactatgcaagaaatttggggttttatggagaagatgttggcagacgtgatttgcacacaaggcattttttgtaatctatgaatagaaaaacgagtgggaatgagatataattacagaaaagagaacacaaaaatttttagaaaataacaacatgaaaccagtcaaatatggggcatagaaatatgaaaaaagagtcaaaattatggaaccgtaacttttttttattatggcagggacagctcgtatcggcattcggggatgcactttatacgattgctttgagcttttttgttttggaactgactggttctacagctgtcatgggaacgattatggctcttgtcacagttccaaaggttctattgggaccgcttttgggcataatggtagaccgagtagacagaaagaaactgattgtcataggggatttaatccggggagtaagtattttgcttgtcacagtagccttcagatttggaattctgaaaatctggatgctgatggcagtagcagtaatagatgggatttgttcagctttttttaatccagcagtggaatcttcgcttccagatattgttacggatgaaaatgttatgagggcaaactctgtgtatcagattgcaacaacaggtgcagagatctttggtcaatctttaggcggagcgatttattcccaacttggagcgccagtgatgtttttgattaatggtatttcttatttgttttcagcaagtacagaaatatttataaaaattccgaatgttgtgtctgagaaatcgaaaggcacgtttcgtgaaaattttaaggacggtattcattttgtgctaaggtatgaagggatgatccgggtgatcgtgatgtcattctttattaattttttattcgggatcattagagtactgatcattccttggtttgtggataatccacagcttggaatgacgagatatggtgtactgagtgcggcacagagtattggtatattaatagggatgactgtgttgtcagttgtgagagttaaggcatctcagaaatataattggtataaaatatcattattttctttcatcctcatgataggagtagctgtactaagcaatcaatattggataatccttcttttgttttttttagcatttggatttcagatgatatttaatatgattatgaattccaccgtaatgcagagaactccagtcaataaaagaggaaaagtttctgccatgaaaacgacacttggaatggccatttctccatttggaaattttgtcggtgggatgctaggagaagtatggaatccaaggggaatcatgtttgtaagtgtattattggctgtcattactgtgtctgttattgtgattcatcctactgtcaaagagtttttaaattatgatacgaccggacagaaataaattttttatgaaagtgaaataaatagttgacaatgtgaatcagattgtcgtatagtaaccataatgaataaaagggagtagctagcgttacccaacgtttacgatgacgtcaggacgatgaaaattcatccgtatcgtaattaaatggcgagacttttattgcatataacaaacatatgcaataaaagtctcgtcattttttatttcacagttataagatctttttctttgatgttgaaatgtttttacagattctggcataataaagacaaggtcatatagcagcaggaggcgttggaagaacctatggtgacagatagaaacttcttcattgcaggataggagggtgaaacatggacaaattttatcaattgtcgaaagaagagacaagaaaaaaggtaaacggccagcaggagccgcttacagaccagcaggtcagggaacaccaggaaaaatatggaaagaatgagctggtggaaggaaagaaaaagagcacgtttcagattttcctggaacagtataaagatttccttgtaatcattctgatcgcagcagcgattgtatctggattcctcggggatgcagagagtgcgatcgttattttagtcgtaatcacgatgaatgcgattctcggaactgtgcagacggtcaaggcagaacagtcattaaacagtttaaagaaattatcaggtccgacagcgaaggtacttcgtaatggaaatgtgatccagattccttcggtagaattaaccgttggtgatgaagttatgctggaagccggagactatgtgccggcagacggacgtattcttcagaatgcaagcttgaaaattgacgagagcgcccttacaggtgaaagtcttggtgtagaaaagtcagatgaagtgatttctggagaagttccacttggagaccagacaaacatggtattctcaggaagctttgtcacttacggaagaggttctttccttgtaaccggaatcggtatggagacggaggttggtaagatcgcaacattgttgaaaacaacttctgagaaacgtactccacttcagattaacttagatcagtttggacagaaattatctatcattattttaattttctgtggtattttatttggaatcaatgtattccgcggagattctatcggagatgcattcctctttgcagttgcccttgcagtagcggcaatcccagaggcattaagctctatcgtgacgatcgttctttcctttggtacacagaagatggcaaaagaacatgcgatcatccgtaagcttcaggctgtagaaggacttggaagtgtatctatcatctgttcggataagacaggtactctgacacagaataagatgacagtagaagattattatgtaaacgaaaagagaattccggcagccgagatcgatattcagaagaaagagcaaagacagctgttggattacagtattctctgtaatgactctacaaacgtagatggtatggaaatcggtgacccgacagagacagctctgatcaatatcggaacaagacttggagtagggacaatggatgtcagagaagcctatccgagaaagacagagattccgtttgacagtgacagaaaattaatgtccactgtcaatgagatggacggagagcgtgtcatgatcacaaagggtgcagtagatgtactcttaaaccgtatggcttatattcaaaagggagatggtgtctgcccgatcacagatgctgacaaagcagcgatcgaagcacagaaccaggaattttcaagaggcggacttcgtgtgcttgcatttgcatataagaagatggaagatgaaagagatctttgcctggaagatgaaaacgatctgatcttccttggtctgatctctatgatggatccgccgcgagtagaatctgcagatgcggttgcagaatgtatccgcgcaggaatcaagccaattatgatcacaggtgaccacaaggtgacagcggcagcgatcgctaagagaattggtattttaaaagacgaatcagaggcatgtgaaggtgcggagattgataatttatcggatgaagagttaaaagattttgtagagcatgtgtcagtatatgcacgagtttcaccggaacataaaatccgtattgtgcgcgcatggcaggaaaaaggaaatatcgtatctatgacaggtgacggtgtcaacgatgcccctgcattaaagcaggcggatattggtgttgcaatgggaatcacaggaagtgaagtttccaaagatgcagcatctatggtactgacagacgataactttgcaacaattattaaggcagtagaaaacggacgtaatgtctataaaaatatcaaaggttccatccagttcctgttatccggtaactttggtgcaatccttgcggtattgtatgcatctatcgcaggtcttccggttccatttgcaccggtacacttattgtttatcaacttgctgacagatagccttccggcaattgcacttggtctggaaccacatacaaaagatgtcatgaatgaaaaacctcgtccgatgaacgaatctattctgacaaaagattttctgattaagattgcaacagaaggtctttctatcggtgtaacaacaatgatcgcatttttaattggattcaagggtggcgatgcagtgcttgcaagtacaatggcatttggtactctttgtacagcaagacttgttcatggatttaactgtaaatcagacagaccggttctctttaagaaaaaaatgtggaacaatatttatctgatcggggcattccttctcggattagtattgattacaagtgtactgatgattccggcactgcactctgtatttaaagtatctacattgaccatccagcagttactgatcgtatatggtcttgcagctgcaaaccttccgatcattcagttattaaaatgcttccgtaagaaatagaagggggttcaatgaacttaaataacgaatcaatcaaaaaaatccgcggactgatccttttcacagcgttgatcgtgatcggtctgtggaagtatgaaattgttctggatgcggttcattttttgtttagcattgcttttccatttattttgggaggtgcgatcgcattcatactaaatgttccgatgaattttatggagaaagtatttttctccaatcaatgggcaaagaataacaagattgtgcagaaaatcaagaaaccgtgtagtttagtcttgtcgattatgcttgtacttggtattatctttgttgtaatcttcgttgtatttccgcagctaggaaaaacaattttaatgctgggagaaagcattcaggtatttataccgaagcttgagctgtgggcagaagatttatttcaaaataatacgggaatcatcgagtggattgagacgatggagtttgactgggataagatgatccaaggcggaattgattttctcagaaatggagcaggaagtgtcttaaatacaacttttgcagcggcaaaaagtattgtcagtggattgacaacattctttatttcagcggtatttgcatgttatatcctacttcagaaaaagaagctgacagttcagatccagaaggtgctgtatgcatttttgccggagaaaaaggttagtactgttcttgatatttgttcactgacttaccggacattttccaatttccttaccgggcagtgtatggaagcggttattttaggaacaatgttctttatcagcatgagtattctgagaatgccatatgcactgttgatcggtgtgttaatcgcatttacagctttgatcccgatttttggggcgtttatcggatgtgtgatcggtacatttctaattctgatggtcaacccaatgcaggcgatcggttttatagtcttattcttagtcttacagcaggtggagggaaatctgatctatccgcacgttgttggaggatctgtaggccttccttccatgtgggtgcttgttgcagtcagtcttggaggaagtctgatgggacttgtaggaatgctgatctttatcccgatggtttctgtgatctatacattgttcagaggatatgtgtatgagagattgagaaagaaaaatatcacagtgttcgagaagaaagaggaaaaggaacatggaacagagacagaagaataaggaatttgaaataaaagtcaacggagacagcgcaattattttgcgctgtttttcgtatggagagagtgcggtgattccgcgggaaattgatggatacagggtgacggagattgcaccgtatgcattttcggcacatatggatcatccgccggaggaggaaaccgggcaggatgcgttgtgtggagaacggttggaggaaattgttttgccggatacgatcgagaaaatcggtcggtatgcgttttataattgtagaaatttaaaacgattgaagttttctacagatattcgagatattggggcaggggcatttaccggatgtcatcagattgaaaaaatggatgtgacggtggttcccgaaaaaaggtcgtgcttccgggaactgctcattgagatcggagaggaacaagaagtcatgtatcactgcccggatggagatgcaaagctgatctttccggaatattttgaggaggcagtggaaaatactccggcgaggatcctcgtcacaaagacgcacggaagtgggatgtggtatcgaaattgtatcgtgaagaatgaattgcaatttgaccagtatgataagcggtttgcgtgggcggtggaaaatgagcaggaagaagttgtggtggcacttgcatttgcacgacttttgtatccgtaccggcttgcggaggatgcaaaggaacagtatgaggggtacttaaaatctcatgtggaaaatgtgtcagagtatcttttgaagaaaaaagatatgaaacttctcacatattatgtggaacattgtattgacaatgtggataaccttcgtgtattaatagacatggtggggataaccggggaggcatcgatgatgagctatctgatggagcagtatcatcagagatttgctgtaacagagaaaaagaagaagtttgaattatagaaggaagaaagataagaaaagcaatgataaaaagagaggaggaagcgatgaatattatacagaaacagcagcaaagagaactggaaaagattgagatctgcatggatatctggaagcaggcgagaaatgaactgtatttgtcgatgcgatttcttgatgtgtctttgagtcgatttttctttttgccggagacgaatataacagggatggggacagatggatttggcatttatttttatccggatgcattgatctacctgtataaaaaggatcggatctatattaatcgagcctatcttcatatagtatttcattgtctgtttggacatttgacgattccgaaaactgtagataccgctttgtgggatcttgcggcagatattgcggtggagtcgatcattgacggactttctgtacgcgcagtcagaagatatgtttcgccatatcggaaaaaagtgtatcagagtctgagggaaaagatgaaggtactgacagtcgcaggaatttatcaagtgttggaagaaaaagaggcgggaagagaagaagatacatggattggagaagctgattttgaaaaactgcgaggagagttttttgtggatgatcatcagctttggaatcaggaagttccgccgcagaaaatgatggaacggcagaaagagtggaaagaggaaaacgagaagcttcagacgaaaatggagacgtttgcaaaagaagcatcagaagatgcagaggcacttgcagagcaggtgcgcgtagaaaatcggacacgatatgattataaaaaatttttgagaaaattttcagtactaaaagaggaaatacaggtagatccagatacctttgattatatattttatcactatggaatggagatgttcggaaatgtaccattgatcgaaccacaggagacgaaggaagtgcataaagtcgaggactttgtcattgccgttgatacatcgatgtcgtgcaaagaagagctgatccgaaaatttttagagcagacatacagtgtgttaagtgagtcggagagctttttcagaaaaatctgtgtgcatatcatccagtgtgatgataaagtacagtcagatgtagtgatccataatcaggaagagatggaatgctatatggagcagtttgagatacatggatttggcggcactgattttcgccctgtgttcggttatgtcaatgagttgattgcaaagaaagcgtttcgaagactccgtggtctgatttattttacagatggatatggaacattcccggcgaaaaagccgttgtatgaaactgcgttcgtatttttaaaagaggattacagtgatgtggacgtgccggcgtgggcgatgaaactgatactggagccagaacaattaagaagaacagaaggtgagatggaatatggatattaagagagcaaaggaagaaatcaaagattcaatcgaagcatatttactgaaagatgcatatggagaatatgagatcccggtgatgagacagcgaccgatatttcttttgggagcaccgggaatcggaaaaacacagattatggaacaggttgcgagagaatgtgggatcgggctggtggcgtatacaatcacgcaccatacaagacagagtgcgattggattaccgctgatctcaaaaaatgagtatgggggaaaagcgtattcggttacagaatatacaatgagtgagatcattgcatcggtgtataaaaagatagaagaaacagggctttcagaaggaattttatttatcgatgagatcaactgtgtgtcggagacacttgctccggcaatgcttcagtttctgcagtataagacgtttggaaatcatgaagtaccaaaaggctgggtgattgtggcagcggggaatccgccggagtataacaagtccgtcagagaatttgatgtggtgacgatggaccgcgtgaagaaaatcgaggtggaagcagatttttcggtttggaaagagtatgcttaccatcaggggattcacccggcagtgatttcttatctgacaaacagacaaaattatttttacaagatggaacatacagtagatggctccttcttcgcaacaccaagaggatgggaagatctgtcaaggctgatccaagtgtatgaaaaactggggaaaaaagtagacagagatgtggtcggttcctatattcagtttccggagattgcaaaggattttgcaaattatctggagctgtattaccgctatgaggcagattatcaggttgaacaggtgatgggaggaaagattccggaaatcttgttgaaaaagatttcccatgcatcttttgatgaaaagctaagtgtgatcagcctgctccttgcgcgtgtcacagaagttttccgcaaagtatttgggcaggaagcctatgtttctatgctgtttgagaagttaaaacaatacaaagatgtgcttggtcagaaaaaggaagcagtggaggcattccgggaaattttagaagaaacttgtgaggaacagaaggaaaaagaacgtgcaaaactgctcacaaaaacggaaaagattgtttatcgaaaagggatcgagaaattggaactgtatctgaaggtattggaggaggggcagatttctgatggagaggatgcatttgagaaaatccgcggactttttgcagaagagcgcggtgcttatgaaaagctggaggaatctgcgggacagaaactggagtatgcatttgactttatggagattgcctttggagccagtcaggaaatgacaatctttatcacggaactaaatatgaatgcttacagtgtaaagttccttcaagaataccagtgcgatagatattatcaatacaacaagcagcttgtgtttgatgagactgacagaaatatctggaaccggatcgagcgggtggagatgccgctttagagaatataagagttccccgggacatagagtatatttataaaataaatatgggggagaaaaagttgttaaatgatctttgggcaggaatgatacttgtaggaattatctatggagcgttgacagggaggatggcagatgtcacgaacgcggcgctggactcttccaaggaagcagtgacactttgtattacaatgcttggagtaatgtctttttgggtagggcttatggaaattgcacagcggtcagggctgatcgctgcagcatcgcgaaaactacagcctgtggtacattttctgtttccagacgtgccaaaaggacacgaagcaaatagacatattacaacaaatatcattgcaaacatcctggggcttggatgggcagcaacgccggcaggactgatggcgatgaagagtcttcaggaagtcaatccaaacaaggacaaaagcattgcgagcagagatatgtgtacgtttttgattttaaatatttcttctttgcagctcattccaatcaatatcattgcctatcggagtcagtatggaagtgtaaatccggcagggattgtcggggcggggattgtggcgacgctggtcagtacggtagtcggagtagcatttgcaatggcgatgggaaaaaggaagcgcgtgtaggaaaagagattttgtcatcctggtgtgttttttgaaataccaaaacatattttagacttgattttttgtaatacatatattatgattattgtaatacaaaaaaggagatgagattatgggaaaaccaggaagaccaaaggggagtgacaataaggagaagatctgttctctgcgcctggatgaacagacgttaaagcgcctgaatgcttactgtgagcgcctgaaagtggcaaagtcagaggtgatccgggaggcaatcgagcggattttggaggaagatcagtataaatagttttccgttttcataagatgataagagcctatttatgaaaacggaggagtagatgaagttcttactatatctgagtgattttatcgtaccttttgtgattttctatatcgtcggttttggaattttgatgaagacaaatgtctatgagcattttataaagggtgcgagaaagggattttttactgttattaagattatgcctacattgatcgggctgatggttgcggtaggagtattgagagcttctggatttttagatttttttgcggaagtggtcagtaggtttgtggtacatatcagatttccggtacagctcgtaccgcttacgatcgtcaggatgttttcttcctcagcagctacagggctggtactggacatctttaaggaatatggaacagattcgtacattgggcttgtggcatctatcatgatgagctgcacggagacaatcttttatacgatgtctgtgtattttatgacagcgaatatcaaaaagacaagatacacactggcgggagcgcttttggcgacatttgcaggaattgcagtaagtgtactgcttgcatcggggatgtatgccgggtaatgattttctgacagactgaaccggagagcaggaaagctctccggttcagtaaggaaattctcgtagaattcagtgtattttgttatcggatatatcgtaaaattcagtgttttcgttatgtggaactgtcagcttctgatgcggcatagataccggaacatagaaggatgagaagtgtgcagatagattagtttatctgtggtattgtcaaaagggtgcgtaaggaaagaatacagatgacagtggaaagcgttttgccatttgactgcattctctttaaactgcgaggatcgtgtatgataattgggggattcgttgacggaaggaaagaggaaagaaatcataagtttgcgaatcgtaagctcgcattcggaataacctgcttccagtaagccgtgaatgaatctttgcagcatgaatgtatccggaaaggtaacagatacttttaattgagagtctgcggaaacaggacatcgtccaatttggaatccgcttagtcgccagtgtcgtttgctgagctgaaaagtggacaggtcttcttccagaagctctaaggaaagaggaagaaattcagattctgctatactaaaaaatcgggttgtagttctgttttggggagagacaatgtggtcagcacaatatagtccgatctctccgccaaaatagattccatattgaccttttttcaacttgatcagacatgttttttcgttatagtcaaagtagatcagaagagcatcctgaagagaaacatcgcggatggcagtatcagcaggacggcggcaggtttttgggagccacgcgtcctctcgataggtaaagagatcatgtagaggcagataggacaaatcatatggaaggagcaagttctgcaaaagagccgatttcttttcagagggcattctttggatctgaagaatcagctttttccttttgtgataattcaaaaggaagagaagaaagagcagcaataagaatactggtaagaaagacataaaaacctccttggaaatatcttattgtattgtatgccacagaggagtcggatgtgtgacagggcagcttatctatcaaccgcatatttagaaacaatatcaaatggggcaggtccgacatcgagaactgcacggtgaaagtttttctgggagaattcatctccgtctattttcatcgctttctttttcaattccataaattcaagatagccaacataatatttcaagtaatttcccggatcagataggatcaaattatatatttcctggatagcatcggtatctttgattccataatcagagaaaaagcgtacagtatcgggtaccgaccatccatcgtaatggattccaatatctgtggcagcatagagtccaagtgtcagagaaccatttttttgaaacagcgcagcctggtcttttggcagcggactcagatagtaggagcacatctcggcataagttgcccatccttccacataaccgctaaaattaaaaatgctgcggagaggttctgtatttttttcagcaaaataagttgtttgatacaagtgtccgggatagccttcgtgtgcaagtgtcgtaaatagttttagggtatcgacattgcgtgattggttgatgtagattacattttctgactggtcgtcaatggcgggaatcatataaaatgcagggctcagataaggttccatagcattgggaacatatttcacttgagcagttacgtccggaggagcaggaaaggcagcagaagatttttgttccagcaatgtcaaaatctgttctggctgattccggtcaatctggttttgcagaaaaatatctgacttgtctggaggtgcttcggcagagacaggacgcgaggcaagttcaggatctttggacagcaatgtctgaatagacaaaagatcagaggaaatctggtcatgaattaatttttttatttcggataccgagcgaggtgagccggtatctctttctacgacatagctatagtattcttttccattcggaaaataacagactccctttttattttttccactgccgcgcagttctagaagggcatcgatcagtgactcataagctggaacgacagcatttgcaatcatttcttgatttttcttttgataattcctttttacagtagaagaaagtccaggtatcttggaaagccgttcatcaaaagttgtgagcagataattggaatctttcatgtcgacaaaggaactacattggtcgaccacagcatctacggtgctgtccgggataaatagaccactatctgccttctccttttcgaaggagatcagagagttgaagtaatccggggtacaggataagagtgagagatatgtatcgacatcttttatatcatgaaatggatattccgctaatagcaccgggagctgtgcctgaattccggtaatctctcctaatggttcctcgtataagagatagggagcgcctttttgggcagtctgcaaataagatttgagaatatcgtaggtgagtttattttcgtctgtgagatcttcatagtgataatgggacaaagcagaaagactgttttctagagatgccatcattccggtcgtatttgtggaaaaagatccgtatgtaaccggagcctgggcgatatcgtaggcagatggatctttcaatgtgtaatgtagtccaatagtatttgcagccacatcctgccggaatagttcaagagtaaattgacggaaagcggtgttagtgtcggaagatgctcgaatagaagagcagccggagaagagtaaagaggacgataagagcagtgcagtaaatgaagtaagatatttgtttttcatagatactccaaagacatttttaacagtttatgagaaagaagcgggaaaaagacatggattcagaggagatggtgtatatgacaaaagaagtgaaaaagctgttgcttgtaatctggatgacagttgtggcagtgtgctgtcttccgacgataactgtggcagaagagggagcagcaaaatcagatgaaagagaggaaatgatttcggatgccgttcttccggtagcagttggttatcgaaacgacagtggggaagtgtcctattatctcaatgggacttcttttctgatcaacgagcaagcagttcttacgaataagcatgtggcggttccagatgagatacttttggaaaaaattatggaagagcatgcgctgaacgaattgccggagaaagatgaaaggttgggaatctacgtaatgacaggaaaaaatatgtttgttcctgcaaagattcatgcaagtgtgcagagtgatcggatggattttgcagttttgcagttgtcgtcgaagttatacgacagagagagtttgacattaggggaaggagtgccgccggaagaaggaaaccctattacgtttgtcggctgttctggggagggataccgggaaaagattttggagaaaattccacagatatcagagcgaggagaggttatccgtcttagtgaatcggaggaggtaccagatggagagaatgataaagtcatcgaacataatattccactatatggagcaggggctggaagcccgcttctaaatgccaacagggaagttgtgggaattaatgtgttccaggaggggatggtgccatatgcagtgcagatctatcatatcagaaaggcattggatacatttgaaattccttataaaaagccggaagcaatggcggagggagaaaagcaaacagagaagcatacagagcaggcagaaaaagagcgaaaaagatttagtaaaaaaatagattcactggaaaatagagagaaccaaaacggaggagaaaccgggagaacaggggtgatactggctgttttcggaggaatggcagccatgatttggatgtcagtgcatacaaatcagaaaaaacatgcagagaagaacggagcaagaatgcaacatacataccaacagatgcagacatcaaaaaggcaggtacgacaagtggatggaaggacagaaagcagatattcgcctggaagaaggaaaagagaagaagagagagaatggaatatggaggaatatatgatggcaagtgaaggcgtgggagaaacaacattgctaaatgcagcgggaggagaaacaacagtacttcacaatgcagagtttgcatatttgcttcgaaaggatacaggagagagaatcctgatcaatacgcagccatttttgattggaaaggagcagaggaaagtcaattactgtatccgggataatacatcggtcagcagatgtcacgcaaaaatcagcaagcaagggtggcagtattatatcgaggatcaaaattcgacaaatggaacttatgtagagggaaaggcattacacccataccaggaaactgctctgtcagacaatgtgacaatccgtctgtcggatgaggtgtttgaatttcatttcatgtaaaaatagagaggagaagggtttatgaaattgttgagtgcggcgtgcagcgatagaggaattaaaaagaagatcaatcaggattccttgctagttcggtcagcaatgacaaaagaaggagaaatcttattggcggcggtctgtgatggaatgggcggactggaaaaaggggaagtggcaagcggagaagtgatccgggcgcttgcaagatggtttgaagaaacacttccattacttctttctggggagcaggagaaaaagggagtgggagaaaggagaaaaagagcgattgcgaaaagtctggaaagcttgatacaggaggaaaaccagatgatttctgtctacggaaaagaaaagaatcttctgcttgggacgacagtttcggcagtcctgttgattgccggatggtatttgatcgtacatgttggagattctcgtgtttatgggcttacagaagacgtgcagcagctgacaaaagaccagacttatgtgcagagagaaattgatgcaggaagactgacaaaagagcaggcaagacaacatccccggagaaatgtactgttgcagtgcgttggagtgcaggagaaaattactccggaatggaagtcgggagtatattatccgggaatgggatttttagtttgctcggatggattttgcaatcaattgctggatggagagcttgaggaaagattttgcaggaattacttgagagcagaatgggagatggaagaaaacttgaaagaagttatggaacagaataaaagacggatggagacggataatctttccgcgatttggatttctgttcaatagggcatcggtaataggagagggagcagcaaaggtaagaaagaaatggaaaggaggaggcagatgcttgagaacggtatgattgtagatggaaaatacaaaattttaaataaaatcggcaggggaggaatgagcacagtttaccttgcaatgaatgagagagcaaatcgacagtgggcgatcaaggaaattcaaaagaaagggaatcgatattatcggacgatgcgggaggaacttctggcagagacggatattctcaaaagactggatcatcccaatcttcctaagattgcagatgttctggaatacaaagatatatttctgatcgtgatggactacatcgaaggaagaccgctcagcctgacattgcaggagcaaggggcacaatctcaggaagtggtagttgcatgggcaaaacaactctgtgatgtactggaatatctgcattcccgaaaaccaccgattatttatcgagatatgaagcctgcaaatattatgctgcggccagatggaagagtgatgctgattgattttggaactgcgagggaatataaggaagaacatgtggaggatacaatctgccttggaacggttggatatgcggcgccggaacagtttgggggaaatgggcagacagatgcaagaacagacattttttgtctgggaaggaccttgtatcatcttttaactggtcataacccatgtatgccaccctatgagatatatccgatccggcattggaatccacagttgtcttctggattagaagaaattatctggaagtgtgtacaaaatgatccgcaggaacggtaccagtcctgcgcagaattattgtatgcattggaacattatagggaatttgatgttgaatgcaagagacagcagcagaagaagtggcggatttttgtctgttcagcagtttgtacattggcatttgcagcgggggctgtggggtttcgctgcgcagaagagaagacagtcaggaacagttatgagcgagtgatgaaagaagcatcgtcttcagtgacaagagaaaaacagattgcgaattatcgaaaagcaatcgcattgaatccgagaaaggcagatgcatatgagttgttattggaaaaggtattcctgactgatgacaatttctctcaggaggaagcggcgatgatgctggaaattttgcagcaaagaggaatgaataaaaaggactatttaagtgttctggagtcggagcagaatgcatatgggaaagtagcttttcggattgggatagcctatttctactattacgaaggagagggaaataaacagttatccgggaggtggtttgtggatgccgccaagtcagagacgctggaagaacatcagagaatgcgtgcaaagatgctggggaaaattgcaggatattatgcacaattaaatcgaaatgatcgggcgggggacagcaaggttacttaccgggaatactgggaagatcttacagaattgacaaaaggaaatatcgtggcgattgataatgaaaaaactgcgcttgtgatgtaccaggaattggtgtatcaaattggtcagaatgcagataaattttatgcagaaggagttaaaagagaagaaatgagcgaacagcttgaaaaagtaaaagagaggctgcggacagatctgacgatacagaatagaggagcgcaaaagaaaatagagaagaaaaaggaggaactggtaaaaaatatttcatgggcagaagaagaggtgaagacaatatgtacgatcaggaacagataattcagatataccgtcagggctttttcatctgtgcaggtttatctgtagttggaggaatcatgacaacgatattttttttgaaatttgggattcggagaatcatcgcagtacgcacaggatatgaggcgaggaaagaaatcagaaggatcgaagaagaaaatcgtaaaaaagaaacaaaaacaagtgatgtgtttgtgttgaaaaagaatgtgatgatggttcatacgaatgaagtgatagaaaaggacggtggaagaagttgagagaatcttggggaagagtcagaaaatgggtacagattatcatgatgcttacaggtccggttgtgttggcgatagccctgtgtaatgttacctccgagaaactttggcaggcgagggcggaagaagtgcagcagataaaaaaggagaagggattaaatggcgaaaattcagtcagaagggcagtcgcgcttgaaaaaattcagtgggaaaaggcagagaaggtctatgatgggaaaagggaagcggtgctcacaggatattatcaggagaaaaaagaagaaaatagagtaacggtcgaggtgcaattagagggaagcaatgtaaaaacttacacggaagcggttattcagaaagtgatcaaacagcctcaaaattatgagctggcagagtgtgagcaaaagaaaatatccggtattcatatgaaagtcattcctaaaaatttgtatttgcaggtagaagatcattctgtggattatggagtgacaatggaaaccttggaagcagatctgagaaaacatgggaaagtatttatcaaggaaggtatcttacgggaagatttagagaaagtaatgcttccagaagtaattttgcgggatccgtatccggaattaaaaattggatcttatgataattgtctgattccggaactaaaaagggaagatggaaaacttgcaaatcctttcgaaggggttgtgcagggaaattactgtatgaaagtggcgcaggaagaagattatggaacactggaggttcttcctcagaaattggaagaggcagaagatgtgatttcagtggagcatagagcggggatatttcagaaggaagaagggcagaatatatgggtcagaggaactagaggggataccggagaaccggtgaaagtaaaattgcatatccgggaagagtcatctttttcacagagatatgacgaagtgtgggtgcggatcaaagaagagggaggagtgtttgtaaatgccacgaaagaagggattgtttttgaagagcagcaggagggagtgcagcgaaggactggagaatggtatttaaaggatagcagagacggttcggggaagacagtcacagaagtggcggatggtcttgtatttgtcattgacagcgaagcaccggaggttatttttcataacttatccttggaaaagaacaagattggtggggaagaacggagattgaactttggcacatatcaaaatacttcttatgcagagaaagtttctgtcgaagatcagaacagtctggatgagagaggaagcggagttgacagatggtcttatgcggtctggaatgtgaaaaaagatcagaaacttacaaaaaatcttgtggagaagctaaccatatcaggggagcttcagtggaatccagtagaagaagagacatgtgagattcttatcggtatagaaaaccaaggaaaagtaaaagaaggaaattatgtcctacttgtgcgggtggaagatcaagtgcagaatcaagcggtgtttttgtcggacggaatagttgtggatctgaaacaaccaaaagtgactcttaggggaatcgactcagagaaatattatacagaagatattccattttcgattaccgtagaagattttcatttgaaaaatcaaaaaattacttccggaattaaagaaatctgtgtcgcattgtcgtgtgatgggacggaatgcttttgcgagacagaacagattcgggagaattttccgaaatccggcactgaggtggagaagacattacaggaattgcagacagaggcaaaggtttccagagaaaaaataatacaagcttccaggcataacagtaatgatgtaaaactttctgtgacggtgtccgaccatgcgggaaatcagactgtggcagaagaaaggctgaaaattgatacagtcgcgccgcaaattatagtggcttacgataataatgacaaaaaaaatggaaattattttcaagaagaaagaacagcacaaattttatatcaggataaaaattttgaacagaaaaatgtcacatttgatgtaggtgtcggcaaaaaacaacagaaaaatgtaagggtacaagatttggaaaaagagtttgggatcctggcagagtggagaagacaagagggcaaagagggagaatgcctatatttgaagtttcaaaaagagcaggaatacagaatcagaccgcattgcaaagaccgcgcaggaaatgtggagcagagagtggactatggggattctgaggctccagagcagtttgtaatcgacacgacggatcctgtggcagaaattcgatattactgcgatggagaggagattcttttatcagaggaagttggtcggagaagctttacagacaaagcaattgaggcgaagattgtaatttgtgagcggaatttttcttttccggaaacattttcagaagaacagagtcaaatggagctctctgtaaaagcagaaggaatgcaggaaggggaatatcctcaggaagtagagggcggatacttccagcaggcagcaaagaggaaaaattggaaaaagatagatacagatacatacactgcaacatttttgtttgaaaaagatgcaaattatatcgcagagtttacgtatatggatctggcaggaaggaaagtcagcattgctccgagaagattcacagtggatcagacggctccgaaaggagaaattgttgtggatgggcagaaaaattcagcagaatcatggagaactgtttcttttagtttgttccaaagagatgcttatcagattcagattacgggagaagatgttacagccggggtggcttccgtaaaatattactgttcgaaacgtccgctttcggaagaagatgtaaagaatttaccatcaaaagaatgggtgaaaggagatgcatttgcagtaaatccggaccaacagtgtatcgtgtatggaaaagtggaagatctggcaggaaatatctgttttttatacccggtaagtggaatgattacggaatgctcagagccaaagatcaaaatgacattggaaggggaaaaatccggtggggtttatcgaggagatgtgacagtaaagatagaagcggaagatctacaggcaggggatacatattcaggaattcaacaagttttctaccatgtggcagcagaagaaaatgtacaggcagataaggaggaaattttatttcaaaaagaagatcatcagacacgaggaaaggcaagatgggaaggagcagttgtcattccggcggaggtgttcaacagcaatgatgtgagggttcaagtaacggtaaaggattctgccggaaacgagaagacagagaacaaagaaaagatagcaatagacatcacaccgccgatccttcacgttcaatatgatgatcagatgcctgtaaacggaaactattacaggaaggcacggaaagcgaccatcactgttcacgagagaaattttgatgaaaagactttgaaaattcaggcaggcagtttggaaggaaggcaaccgatcagtggggaatggaccaggcaggaaggcggaaaaaatacggatcaggatacatatgtatgtacaatgctatttcgggaagatggggtatacaagctttcgcttaattgcacagacaaggcgggaaaccagactatatatgaaaatgatgatgtgtttgtgattgatcagactgctcctgttatccgggtttcgtatcaggaacagacggaaaggacaaagggatattatcataaacctcggactgcagtgatctcgattcaggagaaaaatttccgaccggaagatgtagcgatcaaaatcacagcagttcttgatggggaggagcaaaaggcgccggaaatagggatgtttacatcagagggagtagacagtgaaacatcttcccaaaatagagaaagagaagcagtacaccgtgcaaccattttatatgacaaagatgggacatatacatttaatgtttcttacacagatcttgcgggaaatatggcaaaagagtatccggaagatcgatttaccattgatcggacaagtccgtctgtagaaatctttggagtggagaacaagtctgcaaataatgatatagttgcacctcagattcgttatcaggacagaaactacgaagagaaggatgtcaaaatcgaattgacgggataccatcgcgggaaacttccgatagagggagagaagacggaaatcgtaaacgggcagtatataaaactaccggattttgaacggacgaaggagaaggacgacttgtatacactgacagttcaagtgacggatcgggcaggcaatgtgacaaaaaagtcaattacattttcggtaaatcgatttggctctgtctatacattaagtgacaacacaagaaaacttctgcaaaagcattatacaaaacagccgcaggaaattgaagtgacggaaatcaatatagatacattgcagatgaaggagatcagttatggaagagatggagaagttgtcagattgcaaaaggggaaagactatgcggtggaaaaaaacgaacccgagcagggatggaaaacatacacttataagattggcagacacaattttcagaaagaaggaaattatacggtaacactttcctcaaaagaccgggcagaaaatagagggaacaataagatcaagggagaagaaatcaattttgttgtagatcagacagcgccgacagtggttgttaccggaatagagaattatgggaagtataaagagtcctcgaaaaaaatgacgatttatatggaagataattttgcggcagaggcagtggaagtgtctgttcatggtgagagaaaaataaaaaaaagatacgatgccgagagattgaaacggcagggaggaagggcagaagttgtccttagacaggagaataggtggaaaacggttcgcgtatccggtgtggatgcggcaggaaaccgatcggaggaaaaagtgtttcaaattctggtcacaccggatagaaagattcagtttttctataatcttccatccattgtgggagttgctttgatgatgcatccattgctctgcggagtaatctttttcatcagaaagcagagaagaaagcagacaagaagaaaagattttaaagcagaccagaaaaattcggaaagaggaagttcccaaacttgacattccaaaatccgtatgttacgatttctacatatttttaatttgaaaaagaaaacgcgttgacgaaaagagtaagttgggggaaactttacagagaagttctgattcatatggaaatgtgtggaatgtgacttggacacagacagatacaaagagatatgagatgctgagaggaacaagtggaatctgactgaagatggcttccgagcggtgtatgatactttctgttgtctattcggtctaatctagaagagaatacgaaagaaaagtgtgatacaaagggattcgccctttacagcgaggagtgcagggcactcggtaaggttcgcgctgtgaagagcggataaatagaagtggtaccacgggaatctctcgtcttctcttttgaggaggcgagttttttgtttcaagaaaaacgatgaaataaaaaactctccgggtgagatcctttttgaagatgctgcttttgagtggaaaatctaaatgcgtatattcaaaaaaagaggaggatacaaaatggataagaaaaaattttatatgacaacagcgattgcttatacatcaggcaaaccacacattggaaatacttatgagtttgtacttgctgatgcaatcgcaagatacaaaagaagtcaggggtatgatgtatttttccagacaggaactgacgaacatggacagaagattgaactgaaggctcaggaagctggagtgacaccgaaagaatttgtagacggtgtggctgcacaggtaaaagagattgcagatctgatgaatacatcttatgataaatttattcgtacgacagatgaatatcatgagaaacaagttcagaaaatctttaaaaagctgtatgagcagggagatatttacaaaggatattatgaaggaatgtactgtacaccgtgtgaggcattctttacagaatcacaactggttgatggaaaatgtccggactgtgggcgtgaagtacagccagcaaaggaagaggcatatttcttcaagatgagtaaatatgcggacaggctgattgaacatatcaatacacatccggaatttattcagccggtgtcccgtaaaaatgagatgatgaataacttcttgcttccgggacttcaagatctctgtgtttcaagaacttcttttacatggggaataccggtagattttgatccaaagcatgttgtctatgtatggttagatgcgcttacaaactacatcacaggaattgggtatgactgtgatggagagaacagtgagcagtttaagaaagactggccggcagatcttcacttgatcggaaaggatattatccgcttccatacaatttactggccaatctttttgatggcgctggatcttccacttccgaagcaagtgtttggacatccgtggctgcttcagggcgatggaaagatgagtaaatcaaaaggaaatgtcatctatgcagatgagcttgtaaatatgttcggagttgatgcagtccgctattttgttctgcacgagatgccatttgacaatgacggtgtcatcacatgggaactgatggtagagcgtatgaattctgaccttgcaaatacacttggaaatcttgtgaatcgtacgatctccatgacaaataaatatttcgggggaatcgttacagataagggaattgcagaagaggtagatacagagttaaaagcagttgtagagcgcacaccgggagcagtagatgagaagatggacaaactccgggtagcagatgcaatcacagagatattcaacctgttcaaacgctgcaataagtatattgatgagacaatgccttgggcgcttgcaaaagaagaggacaaaaaggaccgtctggaaacagtgctttacaatctgattacaagtatctcaaagggggcagaattattaagctcatttatgccggagacatctgaaaagattcttgctcaactaaatggaggtcatgtaacagacaagccggagattctattccagagacttgatatggaagaggtcatgaagaaggtagaagaattacatccaccagtagaagaaaatgcagaggaagagtctgtaattgacattgaaccgaaagaagaaatcacatttgaagaatttggaaagatgcagttccaagtcggtgagattattgcctgcgaagcggtaaaaaaatcaaagaaactgctttgttcacaagtaaaggtgggaagtcaggtaaaacagatcgtatcaggaattaaggcacattacacaccagaagagatggtagggaaaaaagtaatggtgcttgtgaatttaaaaccggcgaaactggcaggtgttttatcagagggaatgcttctctgtgcagaagatgcagaaggaaatcttgcattaatgacaccggaaaaagagatgccggcgggggcagaaatctgttaagactctgccctacagcctgcaataaagtaacaaacagattattacgagaaagaaggagaacacaatgagtaaaatcagaattggtattgttggatatggaaacattggacgcggtgtagaacttgcagtcgagagaaatgaagatatggaacttgttgcggtagtgacacgccgtgatccaaaaagcgttcagattctgacggaaggtgtaaagaaagtacattttgatgatattcttacactgaaagatgaagtcgatgtgatgatcctctgcggaggttctgcgacagatcttccagtgatgggaccagaaattgcaaaacacttcaatatgatcgacagttttgatacacatgcaaagattccagagtattttgcagatgtagatacagcggcaaacgaagggaaaaaagtaggaatcatctctgtgggctgggatccgggaatgttctccctgaaccgtatttatgcagaatcaatcctcgtacaaggaagcacttataccttctggggaaagggagtcagccagggacactctgatgcgatccgccgtattgaaggggtgaagaatgcaatccagtatactgttccaattgaggaggcagtggagagagtcagaagtggaagtgagccagaactttccacaagagaaaaacatcttcgggagtgctatgtcgtggcagaggaaggtgcagataaggcactgattgagaagaccatcaaagaaatgccgaattattttgcagattatgatacaaccgttacttttgtatcggaagaggaattaaaagcagaacacagcaaaatgccgcacggcggttttgtgatccgcactggagagactggaagagaaggaaacaagcatgtaattgaatactctttaaaactggactctaatccggaatttacttctagtgtcttagttgcatatgcccgtgctgcatacagacttgcaaacaacggtgactgcggtgcaaagacagtatttgatattgcaccaggcttattgtctatgaaatcagcagaacagctgagaaaagaaattctgtaaaaagaaaaaaagataagagttcaagcgtagtgagaacgagaaaagcaggtattgcaagagggtccgtgtcatattacctcttggcagtacctgctttttataaaagtcttctcgattttgttttcaacaggaagaaacgaacagtttcgattaacttaactgtacttcttttgcttcttcaggtttgaagtcgtttgcaagatcgtagatattgtgaccagtagattcactcaatacgcgtccttctaaagaatagcagcggatgaatctcttattatcgatgcttgaccagtgttctacgtcccatgtcagatatccgtctgcatctgtcttcttttcatttaagatcagatctacctgacgtccatttaccataatgtcaacaagttctttttcagtagcttccagttctactttatttactgtgtcgtaaactttcattttgaagttcctcctcttttttgatatatagacaagtataatcttttttatagataaattcaaaccttttatagaagaaaggatcggaaaagttgaatttacaaggattttcacttataatacaaggacagaagcaaaatccgaaaggggttagtatagatgatttttgagacacatgcacattatgatgatgagcagtttgatgaggacagagaacagcttcttgccggactgcaggaggcaggaatagagacagttgtaaatgtcggtgcaacattggagggatgcctttccacgatcagacttgcagagcaatatccatttatctatgcggcagtcggtgtacatcctgacgaagtcggcacattggatgaggaaaaattttcatggctgaaagaaaagctgtcccatgagaaggttgtggctgtcggtgagattggtcttgattattactgggatcaggaatcacatgaagttcagaaaaaatggtttctccgtcagctggaggctgcaagggaggcgggacttccggtgatcatccacagcagggaagccgcagccgataccttggagatgatgaaagaatatgggcaggatcttaaggggattatccactgttattcgtattctgttgagcatgcaagagagtatgtaaagatggggtatctgctaggaatcggtggggttgtcacatttaaaaatgccagaaaactcaaggaggttgtggaagagattccactggaagcgcttgttttggaaacggattgcccgtatcttgcaccggttccgaacagaggaaagagaaattcttccctgaatcttcctttgatcgcggaagaaattgcggcgatcaaacagatcagctgtgaagaggtgattacacagacgagagaaaatgcaaggaaattatttggagtataggagaaaatatatgaatcagccaacattaggcaatccacagaataccattgcggtattgcaaaaatacaatttttcatttcagaagaaatttggtcagaactttctgattgacacgcatgtgttggacaaaattatccgttcggcagagattacgaaagatgattttgttctggagattggaccgggaatcggtacgatgacacaatatctcgcatgcgcggcgagagaagtcgtggcggttgagattgataaagcattgattccaattctggaggatactttgagcagttatgacaatgtgactgtcatcaatgaagatgtgttaaagctggatattgtaaaactggctcaggagagaaatggagggaaaccgatcaaagtggtggcaaaccttccgtactatattacgacaccgatcattatgggactttttgagagtcatgtcccggtgcagagcattacagttatggtgcaaaaagaggtcgcagaccgcatgcaggttggacctggaacgaaagactatggggcactgtcgctcgcagtgcaatattatgcaaagccatatattgcagcaaatgttccaccgaattgttttatgccgcgaccgaaagtagggtctgcagtgatacggttagaatgccatgaagagcctccggtgcaggtgaaagatgaaaaattgatgttccgtattatcagagcatctttcaatcagagacggaagacactggcaaacggactgaaaaattcacctgaaatttccttatccagagagggaattgagcaggcaattgcggaattaggaaaaggggcgagcgtacgaggagaagccctcaatctggaagagtttgcaactttaagcaatattgtcgggcggttgcagcaagaggagaatggaacgaaagcgtagcgtttatcatttgagtcagagaagggggaaacaactatgagatatcagattttaggagacacacttccggtagttatctgcagactggacgtaggggaaagcatgatcacagagaagggatctatggcatggatgtcaccaaatatgcggatggatacttctacaaatggaggacttggaaaggcattcggaagaatgttttccggggaagcaattttccaaaacatttatacagcgcagggaggagcgggagagattgcattcgcatccagctttcctggttctatccgggcatttcatattcgtccgggagaagaaatagtcgtacagaaaggtggctttcttgcagctgaggcaggaatacagctgtccgttcattttcataaaaaacttgcatccggcctttttggcggagagggatttatactacagaggatttccggcgaaggagtcatgtttgccgagtttgacggacatgtgattgagtatgaacttcagccagggcagcagattgtaattgataccggacatcttgcggcgatgacagcgtcatgccagatggatatacagactgttccggggttaaaaaacaaatttttcgggggagaaggcttttttaacacagtaattacaggaccaggacatgtctggctgcagaccatgccaatcagcaatgtggctggagcacttcgtccatattttccgaccggaaactaatatagaacaaactaaaacagactttttgcgaagaagaaacaaaaagtctgttttttgattaataattatttaatatttttgaatattgcaaaaatgaatgtgttttagtataataagtgctaaattacaaacagatttcagcattcggaaaggagaagcctatgggaaaatcagtttcagaagcattgtttgatgtgacacctcagatcgaagcattagcaaagaagtgtgaagagaataatgagattgagaaagaattatatataaagtatgaagtaaagagaggactgcgcgatctgaacggaaaaggtgttctggcagggctgacgaatgtatcagatgttcgcgcgaagaagattgtcaatggagaggaagttccatgtgaaggaaatttgtattatcgtggatataatgtaaaggatcttgtcaatggatttctaaaaaaggaacattatggatttgaagaaattgcgtatctcctcttattcggagaactgccaaatgagagcgagttaagagagtttcacgatgttcttgtagagcgcagaacgcttccgccgacatttgtgcgagatgtgatcatgaaagcacctagcaaggatatgatgaacagtctctcacgctcgattttaaatctatattcttatgatgaaaaggcagacgatacgtctatcccgaatgtactccggcagtgtctgaatctgatcagccagttcccgatgctgatggtatatggatatcatgcatatcattatcggatgggagaggatttatttatctatgctccggatccggcactctccacagcagaaaatattttaatgatgctaaggaaggataagaagtatacgaagctggaggcgaagatactggatatggcacttgtgctccatatggatcatggcggaggaaataattcaacatttacgacgcatgtagttacttcttctggaacagatacctattcaacgatggcagctgctatggcatcgctgaaagggccaaagcatggaggcgctaatatcaaagtgacacagatgtttgaagatatgaagcagcatcttacagactgggaagatagagatgaagtgaaggcatatctggaagcactcctggataagaaagcattcgatcagaaaggtttgatttatggaatgggacatgcggtctattctatttccgatccaagggcagatatcttccgcgcatttgttgcacagctggcaagagaaaagcattgtgagaaggagtatgctctttatgcactggtggaagaactggcaccaaaagtaatcggtgagaagagaaaaatttacaaaggagtcaatgccaacgtagatttttacagcggtctcgtatatagcatgctcgggctgccaaaggaactgtatacaccgatttttgcaacggcacgtattgtcggatggagtgcacatcgattagaagagttgaaaaatgttgataagattatccgtccggcatataaatcgctggctccgcacagagcatatgttgagatggaagacaggtaaataaaaaagtaggaaggaagagaaacgatggaaaagacagaattttactatccttccggtgatggacatacagagatccacgcaattgagtggagaggagagggacagattaaagctgtccttcaagtctgtcatggaatggtagaatatattgaacggtacgaagcatttgcctcttatcttactgacagaggattcgtagtagttggtcatgatcatctgggacatggaaaatcggtggcagatgaggaagattatggatatttcccaaaagagagcggcaacgaatatgtagtgggagatatccatacccttcgcagaaaaacggagaagaaatatccggggattccatattttatgctgggacatagtatgggttcttttttgctgagacaatatctgctatcctatgcggaagggctgtcaggcgcagtcattatgggaacaggatatcagccattaccgatactgatgctcggcagaggagtttgcaagtgcattgccggaatcagggggtggcgttaccgaagtaagtttgtaaattcgatggcattcggaggatataacaagaagtttcatcctgcaaggactgagatggactggttgacaaaggatgaaaaaatggtagatgcttatttaaaaaatccgatgtgtacctttatttttactgtgagcgcttactatcagatgttcggaggaatgaaacagttacagaaaaaaggagccattgaaaaaataccaaaagatcttccgatattttttgtagctggaaaggaggatcctgtgggaaactttggggatggtgtggaaaaagtctttcaaaaatacaaagactgtggatgtaaagatgtgcagatcaagttatatgaaaatgacagacatgaaattctgaatgaaacggaccgggaaacggtatatgcagatttgtattcttggatggaaagccgtttctgccattgtgaagataaataaaagctgtcgatggaagaatatcttttcaatctttcaggagagacagctttgcatgcgacatcgtagcatgctctgttaagttcccattgctcaaaggagcaaggagaaaaggcattttgttcatagcgagtacgaatttcttcttccgtgtaatgaccaaaaaagctgtcaaaaagaagagcaccaagtgtatagacatttgtaacttcatcaatggcagcgccgtaacaatattcttccggtgcttttaaacgctttgttccccagtagtgttcgcccatgtcgtttatggccggcttttttcggaataagtcgatatcacagattgttattctgtctgtctgaaaatcatacattatgcttcctgcataaaaatcaaccgcaacatatccgctttcagaaacagtattcaaaaaggaaaacagaacttccgcggcagcgattcttttctttaaaggtaattgccgaaaacgctttgcaggagggatcagctgaggattgttgtcatatttctcaaaattccaatgatcgaagagacagtcaccggatgtccacttaaatacagaaatatataaatcgtccagagaaccgtgatctataagttcgatcaaatgtgggtgtgtaatcgtttcgtaaacagacatcgcagatttgagagacgcaatggcctcttcctttgtacggatagattcagcagtggcaattccggcaacttttatgaaaaatttttctgaacctcgcgcgacaccgaaactgatatttccggaatcattctggtcaaagacagcaaaaacatttccgattgcttgcagccatgagaaatcatggatttcttttaggtgaaatttaattgtatctaatgtaacagtaatcatatagcctcctgattccgggaggtaactatcgatcagacctccctgattgtttatggtttctatttttgtttttacatgttattgtcataaaaatcatctcctttatcacgcaaatatctatatgaacacaagacaggcttgtggaacatgagctgtttttgtcaggagaaagtatagcaaacagaagatggattttccagcagattttttaaaaagactgctctttgtgttttgaaaaatgccggaaatcagaaggagtacagtgcttatagtatttaaattgtctgatgaagtaactcatattttcatagccagtattgagggcgatttctgtgattggagcattgcttttcagaagaagggaagcagcttgattgatacggtattcattcaggtatgtaaaaggagatttgccaatcttctttttaaaaaatttacagaaataatttttgttcatatgtgcgcagctggacagctcttctagatgaattttcctcatatagtttgtttctatataagtaaatacttcttttagaggatcgaaattagaagttcttttgaacaaggtttcttcagaaactgtgagaaatgcattgtgtaaaaacagagtttccaatatttgcagcagaagaattttgatggaaagtggagtcgtgggagatggagaatcgtacagtaaggcagcagattctatgagagagcagagcttttcggtacattctttgggcagagtttccccatagggaaattgtaatttttgagacagaagggggaggatcagcgcatcctgacagatgtcgtactgggtaaagctcagtagagacatgggaaacaagagtgcatagtgatgggatactttgctgtgtccgaaaattccatgtacgattccgggattgataaaataaacatgcccttctgtcaatgcgtaagaagaattttctgtacgaagtgtcagagaacctttggtaatatagaggaattctaattcgtcgtgccagtgataaggggcaaagtaggaaccggtaagatctgcttgagagaatgattcaaacggaaaataaggggttccgtgtggtttttcctgaagagtttgtttgttcatgaaagaggacctcctagtttgttaagtgataaaaagtgaatatagcataaatatagaataacatattgcaagaaaatacgaaacaaagtgtttatactatcattaacaattaaaatcggaggaagaaaaaatgtggtggaaaaatagtgtagtatatcagatttatccaagaagttttgcagacagtaatggagacggaattggggatctaaatgggattacggcacatcttgattatttgcagaaacttggagtagatgtcgtatggctttcaccggtctatcagtcaccgaatgatgacaatgggtatgatatttcggattatcagaacattatgcaggaatttggtactatggaagagtttgaccggatgcttgcagaaatgcacaaaagaggaatacggcttgtgatggacttagttgtgaatcatacttcggatgaacatgcatggtttatcgaaagtaaaaagtcaaaagaaaatccatatagagacttttatatatggcgagagggaaaggacggaaaagaaccgaacaactggggggcgtgtttcggaggctctacatgggagtacgacagagaaacagatatgtactatcttcattgtttttcaaagaaacagccggatctcaactgggaaaataaagccgtacggaacaatatatacgagatgatgtgctggtggtgtgagaaaggaatcgatggattccgtatggatgtgatcagtatgatttccaaggagcaaagttatccggatggggaaattcacggtggtagtagctacgcagatttcggaccatttgtctgcaatggaccgagagtacatgagtatcttcaggagatgaatagggaagttctctcaaaatacaatctgctgaccgttggggaaacagcgggagtgacaatcgaagaggcaaagaaatatgcaaatctggatggaacagagcttggaatggtatttcagtttgaacatgtagatttaactgtcggagaatttggaaagtggacggatgagagattctgtttgaaagatttgagggaagttctgaacaaatggcagacagaattagaaggaaaagcatggaacagcctttactggagtaatcatgatcagccaagagcagtttcccgctttggaaatgacggaccgatgtatcgaaaactttcggcaaaaatgcttgcgacttgtcttcatatgatgaaaggaactccatatatttatcaaggggaagaaattggaatgaccaatgcatattttgagaaaatagaagaataccgggatatcgagagtattcatgcctttgaggatgcaatggagagaaatatcatggcagaagaggatatgatcagtgcattgaaagcaatcagtcgtgacaatgcaagaacaccaatgcaatggaatcgaagcagacatgcgggatttacgacagggactccttggattggcatcaatcagaattatcttcagattaatgcagaagatgcacttcaggatgcagacagtattttctactactatcagaaactaattgcactcagaaaacagtataatattgtcgttgatggtatcttttatggactgttagaagatgatgacaagatttacgcatacgagcggattttggggaatcagaaacttgtggtaggatgtaattttacagacaaaaaagtggattgtacactttttgacaatgcggaagaaggagaggaactgatctccaattacaaacatcataaaaaaggtattttgaagccgtatgaggcgagggtaatcttattttcataaaggcaggaacatgaagatgtggaaatgatgacaaaaatgataatgattctaaagatgggaaagtacagcttcgttttgcaacatgggatgttgcagaagatatggatcgtcagcagaaattggtagatgagtttaacaaagcacatgaaaatatcgaagtgacattagaggcatatggaagtaattacgatacaaaaatcagcgcagggatgggttccagcgatgccccggatattatgtatatgtggaattatcctgcatatgcggatggtctggaaccgcttgagtcttacatagaaaaagaaggtggggctgagtttaaggaaaaattcagcgatacgttgtggaactataattctcttgaagaagaaatttatggagtgccggttggatttacttctcatgtattgtattacaataaagatttatttacagaggcggggctggaagagccgacgaatgaatggacatggcctgatttgcaggatgctgcaaaaacaatcacagaaaaaacagatgcaaagggatttgcatttcagatgaaacctgacccgtatgactttgagatcggaagtgctgggagaagtggcgcaacaatagaatgacagtgagtacagcaaaaacccgtcagctgtggaagctgacgggttctgccgttttatagttattaaaggaatgagagttaaagtactacaccccggaatccccgaggtgcagttactttatgaggggggagatagtgagtgttaatcaactatctaaacgtagtataacgaataaatgtgtctaaaatatgtgtaatttctaaaagaaaacaaaaaaatattaagtaagtcttaaggcggatgatattttaaataatggcttaaaatagcgattgaacaacatagaaaaactatccttatatcaatgtgatatgccccttgtgggcggttgttccttttaattgtattatagagcagttggaaatagattttttggagggcggggaatagtcctctttttgttttgaaaagggcaggaaggaaagaggctacaaatatgagcacatattcagaatatcggttggactcgcacgttagtaacaaaaatgcttgaaaacccactaaaatcgtgatatgaaattaaacatttcttaataatttccgtaatcccctcttaaaaaatcactgttatccttgtataatacagaggaggtgataaatatgtttaatgtattagtatgtgatgatgataaagaaattgtagaagcgattgaaatttatttacggcaggaaggttacaatgtattaaaagcctacgatggacaggaggcgatcaaggttcttgattcgacggaggtagaccttcttattattgatgtgatgatgccgaaactggacggcataagggcaacgttaaagatcagagagaaaaacagtctgccaattattattctctctgcaaaatcagaagatgcagacaaaatattaggattgaatgtaggagcagatgattatctgacaaagccatttaatccgctggagttagtggcaagagtaaaatcccagcttagaagatatacacagcttggaagcacagtagttgagaagaaaagttcggtatttactgtgggagggctgaaaattgatgatgaattaaaagaggtgacagttgacggagatgttatcaggctgacacctatcgaatataacattttattactattagtgaaaaatcaaggaaaagtcttttctatcaatcaaatctatgaaagtatatggaacgaagacgcaatcggcgcggataatacggtcgcagtacatatccgccatatacgggaaaagattgaaatcaatccgaaggaaccgagatacttgaaagtcgtatggggggtcggatataagatagagaaactttaaagagcagggaatgtcattttgatttagcaagatggcggaccgtaaggctctggaaaggagtaagtatgaataaatggtatcaatcaagattgtgtaaagggttgctgctcgttctggtgcacgtgcttacagtgattatggttctcagccttgcgtggattcttgtttatccggggcaggaatatctgagtgcatttcagaaagataaaccacttgcatatgaggacagtgaggggtttgaagatacagtacagacaacggtatcgaacattttagactacaatacacttcgtccgatttttgagactgaaggaaaatatgatacaaacagactgatcgatttgaagaaatttgatgaaaatgcaagagcggtagatggaacaaacaaatcgggaatggcatatcaagttggagatctgatcaagtgggcagaatcctacaatggaatagactacacggaggaagaaggagtcattgtctgcaaaaaggaagatggcacataccattattattataaatcggaatttaagaagttgatcgaagaaaaatcgctgcagttcatagaaacagaagaaatgagtctggaaggatatatggcacaactgggatatgaagaatatatgaatgacatctattattctgatgaggcagagaaaacgattagagataaagaaggaaaagtactctatgtagactgctgggaattttcagacggcgtgatcaatgaaaagtatgcaccggaaggatttaagaatcttctggaactggtcaatacagatgcagaatggaatggaaaacttgaggaagtttacagaatacttgacaatacactggtgatccttcctcattattattaccagtacaaagatgggctggagactgtggaagaaggaaatacgaatctggcatatatgtatgtggaccagaaagcgaaaaaagtatacacgaaccgcagtgcatacaaagattacaataaagtagaagaaaatataaaaaagatgactgcacagggaaaatatgtagttgtcgctccgaaacttgcagattttcagtcaaatatggatgtttcggcggaagaatggaagaatatggtgacaggaagtgcaaatcagaaagaggagtttctttttgcagtttccgtagatacgaattatccaatccaagacagtttttatatgaaaaataaagagtatgaacagtatagtccgtgggtgaaagtaattgtagtgggaagtgcggtttcggcaattcttttcctgataagttttatctggctgacggcagtgacaggtcatgtaaatggaaaagaaggaattacactgaacttttttgaccggattaagacggagatcgcagcggcattgatcattggaggaatgctacttgcaatcatgctgccgatttcggggttgagtcttccgggagatctgtcatatggctatactgaagaaggactttatatatcctctgcttatggatttgaggaacgcttttttgagatggtattgatcggaggaattgggactcttatcacttgtgcagtaggaatgttagggtatttgagtcttgtcaaacggatcaaggcgagaactctttggaaaaacagcgttttacggtgggtgggacacttgtttagggtgttttgggagaaccggagaagtacgacaaaaatcacgttgggatacatgggatttatgttactgcagttattgttggcgaccggatatccagtctttgttttgtttgttcttgcaatggatgtagcggtgtttgcatatctgttaaagagcgcgatcgcgaagcagagaatcaagtttggaattcagagaattgcatctggagatgttaattataaaattccgattggaaatatggtgaaagaggatacagagattgtacaaaatattaatcacattggggaaggaattcacaatgcggttgaggcaaatatgaaaaatgagcgcctgaagacagatttgattacaaatgtctcacacgatattaagactcctttgacatccattatcaattatgtcggtcttctgaagcaggagaaatttgaagatccgaagattcagggatatctgcaaattttagatgcaaaatcccagcggctgaaaacactgacggaagatgtggtagaggcgtcgaagatcagcagtggaaatattacattgcactatatgaatattgatctggtagaattgatcaaccagacgacaggggaatttgcagagaaatttgagaagagaaatttaagcattgttgttaatgttccgaaggaaccggcaatgattcgtgtggatagcagaagaatttggcgtgtcattgaaaatatttataataatgctgccaaatatgcaatggaaggtacaagaatttatgctgatttgagaatgtcagaccgctatgtacaattttctctcaaaaatgtatcagaacagccgttaaatatttccgcagatgaattgacagaacgttttatccgcggagatgtatcaagaagtacggaaggaagtggactgggattgtcgattgcgaaaaacctgacagaacttcaaggaggaaaattcttactgtatctggacggagatctttttaaagtgacgatcgtattcccaagactgtatcagcagcagggaaatccacaaccgcagccggaagaaagcaaataagagagcttattgcagggaatagatgaagatcaagtatgaaaaaggtcagacccgaagatagatatctctaaaaaggatggggaaattatgaaatttccctgtcctttcttgcatttgcagggggcaggcattacaatacaactacgaaagaaaaaaaggagtaaagagcagatggaagagattaaaaaaatactggaagaaatcctcaatatagatctgatcggagctacactcagtaatccgagaaaaaaagaagaaatcgtaaaagtgaaagtacgtcctgtactgataaaggatgtacttttctttcaatgtgagacacataaaaaccgtcaagtatttcatgagaattatgagtatgaacaggcgctgcacatacttacacaggatatggaactgtttcgtcagatgcagattgagacaaaggagtttcaatacacagtgctcgtgagcaaaaaggggaaggtaactattcagaaaaaaagaacaaagggggagaagcggcaggcagaattatcccacaaccggacgaaaaactatattttgaaggaagggattcaggttccgtttttacaagatctcggagttatgacggcagatgggaaggttgtccggagtaagttcgataagttcagacagatcaaccgttttttggaatttattgaggatattctgccgcaacttgcaaaagacagggaggtaaccattcttgattttggatgtggcaaatcttatctgacatttgcgatgtattattatctgcacgaactgaagcactatgatattcggatcatcggactggatctgaaaaaagatgtgattgcaaactgcaatcagcttagcgaaaagtatggatatgagaagttaaaatttctcgagggaaatattgcggattataccggggttgaggaagtagatatggtagtgacattgcatgcatgcgatactgcaacagactttgcacttgcaaaagcagtagggtggaatgccaaagtaattttatcggtaccatgctgtcagcatgaagtcaatggacagattcaaaatgagatcttgaggccggtactgaaatatggactgatcaaagagcggatgtctgcattgattacagacgcgctgcgggcggagtatcttgagggagaaggatatgatgcacagatcttagagtttatcgatatggagcatacgccaaagaatattttgatcagagcaataaaaacaggaaagaaaaagaataataaagaacagatagaaagatgccgggagtttttacagattcatccgacattaggggaactgttgcaataaaggggagttttgcatgaaagaaaaggtaaaacgagcaggaattctgatgtttgtatttttgatcgctgtcatcgtttttagttttctgaccaatcagggaaatgctgatatgacagcagatatggggggagcgacactgccgaggatacagattgtatcgggagaatatgagatcaatccattggtaggttatgtttcagagatgaatattgggaaaatgagaagcacgatcacaccagtggattttcagagtggaatcgcgctcctaatagaagaaggagtgttgccgataaaagcgctgacttatgaagtatgttcgtcagatggaaaagaaattctttataaggaaaagagaaaggaaatcggtgaggaaccatcattgacttttccagggttggagcttgcagatcgggaagcgattttaaaactgacattgcatacggaaaaacaggatatttattattacacgagaatctgcacaaaagaagaaacagacagcgatgcgtgtcttgcatttgcagaacgatttcacaatatgacatttggaaaagaaaatacagagtcgatcgcagcctatcttgagaatggaacggaagatgatgagacagagaatttacagaaagttacaatccattctgatgcagaacatttgacctggggggaactgcgtccgcagatcaaaggagaagtcagcagaagtattaaggaaattagcggtaattatatgaccattgtctatgactatgaagtggagtgtgccggagagcaggatgaaacggaagtttatcagatacgggagtatctgaaagtgagatatgcagaaggaaccgaataccttcttgattatgagcggacgatggaacaagaattagatgcgtcggagaatgttttagataataatggaattttgctgggaattgcgaaagaagaatttccctatatggcaaatgaggcagggacgatcgtttcctttgtacaggcaggcgaattgtggaattataatcagagccaggatgcactgtcacttgtatttagctttgcagattccgaaggatatgacattcgaaatttatacaaggaacatgagatccagattgtatcggtcaatgagcagggagacacaacatttaaagtaatcgggtatatgaatcgaggagaacatgaaggtgaagtcggcacggcaatctacttttttgatattgagaaaaattttgtggaagaaaaagcattcattcccgataatatttccagtgaaattttattaaaagaacaggagcagcttgtctattataacgagcagcaagaagtgctctacgcaatgaaagaaggaacactttacaaagttgatctggaaaaagggaaaaaggaagctttggtagagaatcttgaaaaagaccagtatgtatcttcaaaagatggaagacttcttgcctatcagaccgtttcttcgcttgaaaatgcggaggaagttaaagtgcttgattttgtcactggaaaagagcggacggttacttgcagttctggagaatttattcgaccgcttggatttatttctgaggacttcgtctatgggattgggcgcaaggaagatgcaggagcttttgttaccggagagcatgtctgcccgatgtataagctggaaatccgtgatacagacaatgaagttgtaaagatctatcaggcggatcaagtctatgtgacaggagtgaccgtagaagagaaaatgttgatattagaccgtgttgtgaaaaatgagtctgtgtatacagcggttgcaaaggattatattacaagtaatgaagaagtagaaaagagtaatatttcggtagaaacatatacttctgacgaaaaagaacggcaggtaagaattaaatatgagtcaggaatttccgataagaagccgaaacttttgaagccaaagcaagtattgtttgagaatccggttctgattccatttgaggaagaaggagaggccgaagtattttatacctatggaaaaggaaagttacttggaatctatgcaagtgcagcagatgcgattcggcaggcaaatgaaaatcaagggcttgtagtatcagaaagtcagaagtatgtatgggaacgaggaaacagaagtcttgtgtatgatatcgcaggagtggatctcagtccatatcaagaagggaacacattggcagcggcgctgaaccgtcttttcgcttatgaaggaaaaacagtagatgccgccggagaaatggcggcgggaaaaaagccgatcgagattctccaagaacagtttctaggaaatgtacttgatctccatggatgcagtccggaagaattatgttatatcctcggaaaaggtactccgatcatcgctatgacggatttaaataatgcggtattgctgatcggatacaacgatagtatgatcacttatgtaaaaccggataccggagagaaggtctcagttccgtatgaggaactggaggcattgactgtggccagcgggaacacatatcttggctatttaaagtaaaagcaaaatcgcatccatcattaactagcagggaaatatgttttgactgcaaaaagaatagcaggattataaaaacggaaagaaaacatgaaaaaactgagaatagcctttcgcttaaggcagattctcagtttttttctttgcaaacaagattaatcgtttaaaatctcagtgtctaaaaagttttataggatatattataaagcaaatagacggtgtttgtatttgtttaatgtaaaataaaggatcattccgagtacaccgcaggaaatcacttcaccgattccgatgctcagcataagaagcgggatcgggattgcttccccgtaagcaaaacgcagtacatatgggataatgactgtatttgcgacaattggtggaagcggtgctaaaaatttattctgattgcgcagaatataagtgaagacagcaccgattaaagttgcaagtgttccgaagataatatccggaagcattgcacctccgagaatatttccaatcagacatccgacaaaaagtcccggaatggcagccggggtaaatgccggcagaatggtaagtgcttccgcaattcttacctgcaccgatccaaagctgaatggtgcaaaaacaactgtcaatacgacatagatagcagcaatcatcgctgcctgcgtggtaaatactacacctttgtttttcataattcaaatctcctttagttttgttttacgtgtggaaggtctcgaacacactttgctgaaacccgtctagaccttattttataagggattcagcggttgatagtatagcatagaatagaatgaaaaatcaagctgtctctaccatttgctcgaaatgaaaataaaagtggtgttagaatctaatccatatcttaaaagtattggcttagtagtttttcgttgatacggtgttttgatgattcagggggcagagaaaacacagaaggtaattgagagcgggttaagaatatgttataattctggcagggaaaccaaagccgggcggcttactctcttttacggaggggcaaccctccagacgaaagaaaggagggcgatgctaatgtatgttacatattctgatttgattcagttattaatattcattgttgcccttgtaggtctttgttacgagattttcaaggataaacgaaaatagccgccattactcgcaataatgacggcttaagtaaattaagcatttaattattgggtaagccgtttatgttttccccttttgtatctttaatatagcacatcgcaatagattctgcaagtttgtcccttctatcaaaagcagattttctgtcttttttatcatttcttcttcggaatagaacagttcatcgtttattgtctcaaaaaattctggaatatgaagaggagtcaaggttcttcggtgtttaagaagacattttccttggattcaaagtgataagaatagtctcaccgttctttgaaatcaatactttaaaaaatcaccaaaaatcactgagaaatctatacttttgattgctagaacatagaaaatgcgttatactgtaacaatgaatatcaaatcagccatatctgtccggtgtactgtatcttttattttcaagcagaatgataaagatggaacacagtgaaatctgaaatcagtggaagaagataaatcgtgcaggcatcggttgtagataaatataagaaaaggagtagtgagagatggaattagtaactgtgaaagaactttacaagaacagagaggcatacttagataatcaggttactgtcggtggatgggtgcgcagtattcgtgattctaagacatttgggtttatcgttgtcaatgacggttcattttttgagacacttcaggtcgtataccacgacagtatggacaattttgcggagatttccaagctaaatgtaggtgctgctattattgtaaagggaacattagtagctacgcctcaggcaaagcagccatttgagatccaggcagaggaagtgatcatagagggggcatctgcaccggattatccgttacagaaaaagcgtcacagctttgaatatttgagaacaatttcacatcttcgtccgagaacaaatacattccaggcagtatttcgtgtaagatctttgattgcatatgcaatccatcagttcttccaagagagagggtttgtgtatgtgcatacaccgctgatcacaggaagtgactgcgagggtgcaggagagatgttccgtgtcacaacactggatatggagaatgtcccgaagaatgcagatggaagtgtggactatacgaaggatttctttaataaggagacaagccttactgtaagtggacagctcaatgcagagacatatgcgcaggcattccgtaatgtatatacatttggaccgacattccgtgcagagaactctaatacaactcgtcatgcagcggaattctggatggtagaaccggagatcgcatttgcagatctggatgatgatatgatccttgctgaggcaatgttaaagcatatcatcaactatgtactggagaacgcaccggaagagatgaatttcttcaactctttcgtagataagggacttcttgatcgtctccacaatgttgtgtcctctgaatttgcacgtgtaacttacacagaggcaattgagatcttagagaagaacaatgataaatttgacttcaaagtgtcatggggagttgacttgcagacagaacatgagcgctatcttacagaggaagtgttcaaacgtccggtatttgtgacagattatccgaaggatattaaggcattctacatgaagatgaatgatgacaataagacagtagcagcggtagactgtcttgttcctggaatcggagagctcattggaggaagccagagagaggatgattatgacaaactgctgaagcgtatgcaggagatgaacctggatccggaagagtatcagttctatctggatctgagaaaatatggctctacaagacatgcaggattcggacttggatttgaaagatgtgtgatgtatctgactggtatgtcaaatatcagagatgtcattccgttcccaagaactgtgaataactgtgaactgtaaagaatgaaagaaaccaaggcggggcgggtatttgtatactttgcctcgccattttaaaattgtaaggggaattgaggaggaaatatgaatattttagttgtagatgatgagaaggagatcgcggatgtgattgcgctctatttacagagtgatcagtataccgtgtatccattttataccggcgaagaagcgttggaatgtatgaagacgacgaagattgatcttgcaatcctcgatgtcatgcttccggggatcgatggatttgaaattttaaagaagatccgagagaggtatacatttccggttatcatgcttaccgcaaaaacggagtatattgataagatcactgggctgacgcttggtgcagatgattatattttgaagccgtttaatcctctggaactaatcgcaagagtgaaagcgcagcttcggagatatacacagtataatgaaggaacaaggactgacagtggagatatcattgattttgcaggacttcagctaaacagagaatctcatgagtgtgtctataatgagaaacagctgacactgacaccgattgaatttgatcttttgtggatgctgtgtgagaaccgtggaaaggttatcagctcggaagaattgtttgaaaatgtatggaaagaaaagtattacaaaaatagtaacaatacagtcatggtacatattcggcatctgcgtgagaagatgagcgggccgaccggaaagagcgattttattaagacggtttggggagtaggatataaagttgaagagtaaaaattatacaagattaaagattaacattctgcttcagacaatgcttgtggtactgtttacggcgcttgtcggctatcttttcaaaaatcttgtcatagatgggatttataatcataagtttgcagatggatttgtacatttttttatgtggtttcatatgccggagcaacaggcgatcgatctctactggaaagtgattggaaacaataaaatttattttatgggtgcgggattccttttattgttttccttttttttctattttgtgctgagcagaatcacacagtacttgaaggaaattaatcagggaattgaaaatattttatcggattttaatgaacctgtgcggtttaaacctgcgctgcggccgcttgaggatagcttaaatgagattaagatgacgatccggaggcaggaacaggaggcgattgagagtgagaaaaagaaaaatgatctggttgtttttctggcacacgatttgaaaacacccttgacttccattgtggcatatttaagtattcttgaaacaaagccggatatgccggaggaggagcggaaaaaatatacgcatatttctctggagaaggcaatccgtctgggagagctgatcaatgaattttttgagattacaaagtttaatttacaggatattgttctggagccgggaaatttagatttgtctatgatgttggaacagattgcggatgaactgtatgcggttttgaaggagaaaaacttaagatgtgacgtgcagattgatgatacactgatgatttacggagatgcggataagcttgccagagtatttgataatcttttgcgaaatgcgattgcgtactgtgacaaaggaactgcgatacggattcaggcaaaggagcggcaccaggagatcgagattgttgtggcaaatgaaggagagaagattccggaagaggaactgagtgcaatttttgagaagttttaccgagtggatggttcgcgctccagcaagacaggaggagcaggacttggacttgccattgcaaaagaaattgtggaactgcatcatggaacgatccgtgcggagagtgacgagtgggaaacacggtttatcgtgacgttaccggcgatgagtgaaggagaataattttatgaattttatacagatagcagatgtccatctaggggcagcgccggaggcgggaaggcgtgatgacggacagcgggaaaaggagatctgggatagtttttacaaagtcattgacatctgtgaggagaaacagattgacctgttgctgatcgcaggagatttatttcacaggcagcctctgttgagagaactcaaagagataaattatcattttggaaaattatctcggacaaaggtcgttttgattgcaggaaatcatgactatattcgaaaggattcgcgttatctgcagatagcatggagtgaaaatgtctatccactgtttgaaactacattacacagagcggtgatcgaggagctggatcttgcagtgtatggattcagctatgacagacgggaaatcagagaggcacggtacgacgaggcgtatgccccgcgggatatgaaatatgaaatccttctggctcacggaggggatgagacacatattccgatcaaaaaagcaaagttaaaagcactgggctatgattatgttgcactgggacatattcataaaccacagatgctattgaaaaactatgcggcattttcaggttctcttgagccgctcgatcaaaatgaaacaggaagacatggatttcttcttggagagattaccgagaaaggagcgcagatccgttttgttccatttgcaaaaaggcagtacatacacttgcatctcacagtggatatagaaatgacacatggggcgctgcggggaaagatcaaagaggagatcgaaaaaaatggcactgcggagctgtacaaaattattttggaaggacagagagatccggagattgtctatgatatagaagatctcgactattatggaaatatcgtggagattcttgatcataccgttcctgcatatcactatgaacagctgtacgagagaaataaagaaaatctgcttggaaggttgatcggacattttatggaatgcgagccggaaagtatcgagtatcaggcaatgtgcgagggagtcagtgcaattcttgcagctatggaggagagaagttaggtgattatcagagaattatatctgaaaagctttggaaaattttcagagacaaagatagaactggaagaaggcttccacattttttacggagaaaatgagttcggaaaaagtacactgcatgcttttatcagaagtatgctatttggactgacaaaagggcgcggaagggcagcaaaaaatgatctgtttacaaaatatgagccgtgggatcagccgtcttactatgcgggagagatgacatttgagtctggcgacagaacttttatcatcagccgtcggtttgaccgctatggaaagagcgcaagtcttgtctgtcagacagacggagagatcttatcggtggaacagggagatatggatatgcttctggatggcatgtcagaagctgcatttgaaaataccatctcaatcggtcagacaaaagcagagacaagtgccgatcttggtgcagaattgcgaaactatgctgcaaattattactgttccgggaacagtgagatggatgtggagcgcgcgcttgcgattttaaaagagcgacgaaagacagtggaaaaccgtcagaaagaaattcgcaaaaagaagcaggaaaagcgagagaaagttgaacagcaggcggcatacatcagcgaagaaatcgagcgaaaacaagcggaagaagaacaaatcagcaaaaacatcgaacagggaaagcaggaagaaaaaagaattgtcagaactccagaagaagagcaaagcacggaaaaacagaatgtatgggatgtggtcaaaataaagttattgccggttgtatttctggcaggcgttgcgggtatttccttgctatttcaggggattttgaaatggagtgtgctgtcaggagcgataattctggaaatagtattcctgtggaaattgatggaagcattccgacaggcggaggaaaaagtacagcaagagacagaggagtcccgggaagcagaaaaacgagaaatttcactcgaacatgagcaagagcggcatagagaagctttgcgaaggatggttgtcagacgggagctgctccgggaagagattgcagagaaacagatgcagtacgagaatctctgtgagcaaggagaagaactcatggaagtcagtgaagaatatgttgttctggaagagaaaggaagagcgatccagcttgcggaggacacgatccggcatctgtccacagatgtgagaaaggaatttggaacaaggctgaatgaggtgtcttcagagatattgtgtgcaattacagatggaaaatatgatcgcatttttatagatgaaaatacgaacatatatctattacaaggggcacagaaaatttcagtgggacaagtcagcaggggaacgatggaacagatttattttgcgctccgtatggcagcggcagagttgatgtacgaggaagagtttccggtaattctcgatgagacattcgcatactatgatgagagaagacttgagaatacacttcgctggcttgcagaaaacaagagacagattattttatttacctgtcagagaagagagttagagatgttaaggaaactcggtatcccatatcatgtgaatgggtaaaatatggtttctttttgcaaatatcaaaataaaagaacccggagagaagttgtatcttgtagatataagtcttctctccgggttcttcttttctgaattattaaaatgtatgaaatatgaagaaatatctttaaaatttctttacaatgataaatgattcaggataattaaaattaaaagtaaaaaactaaataggttctccatttttgtatttctgaacaacatgctggatacgttcgttcggactgaggatactgctgatagaaccatcgtgattcaaagtatcaatcagaagagcgatgtatttgctgagatcgcagttgatgtagtaaggtctgctcagcaattcaggtgtctggtaaattaagtttgttgttaggattccgtggataataccttcttcgtaagccttgtcaaatttatcaagaccgtttgtaaacagaccgaaagtagcggcagcgaagattctctttgcttttcttctctttaactctgttgcaacgtcaatgatactgtcaccggaagaaatcatatcgtcgatgatgatcacgtcttttccttctacagaagaaccaaggaattcatgtgcaacgatcggattgcgtccgtctacaatctgtgtatagtcacggcgtttgtagaacatacccatatcaagcccaagtacattagcaagatatacggcacggcttgtaccaccttcgtccgggctgattgccatcatgtgatcgctgtcaatgatgagatcaggtacagtgcgaagaagtcctttgataaactggtaagttggacgtactgtctcgaatccgctgagcgggatagcgttctgtacacgaggatcatgagcatcaaatgtgataatattgtcaacacccatgcttacaagttcctgaagagcaagtgcgcagtctaaagactctcgggaacttctcttgtgctgacggctttcgtataagaatggcataatgacatttaatctacgagcctttcctccgacagcagcgataacacgcttcaggttttggaaatgatcgtctggtgacatgtgatttacatggccacttaaggaataagtcaggctgtagttgcagacatctaccatcagatataagtccttaccacgtacagattcattgatcactccttttgcttccccagaaccaaaacgaggtactttggcgtcgattaagtagttatctttctcatatcctgtgaacacgacgtcatttttgtgttcgtgggagctttccttacgccattttacaaggtagtcatttaccttgtttccaagctcctgacatccgtctactgcgatgattccaagtgatcccacagggatgttttctaaatttcgttcttctcgatgtaacatgtttgttcctccatattcataagtttctttttgattcgtatgtcatctccagttagtcttaacatagtatagttgctcgtgattcttgaaaaaattctctcagaataaatctcaacaattgattccaaagacaagtttgtcgatatgatcgtagagcgcttctttaaaagacgttcatttagacacaaaaacaactgggaagcgatgaaagaattcgtcagttctgttcccagatcgtcaataatgagcaggtcacagtcaaaaatgtagccgtacattgtgtcggcaagtgtatctttatcaaaccggctcttagcaaatatatcaaataattcaaatgctgtaaagtagataacggaataagcgctgtctattagttcctttgcaatgcagtttgagagaaaagtctttccgactccggtatctccatataaaaacagattgcggaattcctgtccgaatgttcggacaaattctttgctgactaccaatgcatctctcatgatggaaagtgaagagcgtccagtctttggatctatgtgattttcagaataatatgcaagagaaaatgtattaaaattctcttttgcaaggatttcttttagattagactgtgtatataaaagatcaatggtcgcttttttaaagcagtgacacttctgactgccaatatatccggtatctttgcagtctgcacattcataagaaggttccagataatcctccgggaatccatacgaggacagaagggcagacttcttttgacggagcatggaaatctcttctttcagagaggagagagcagtctcatctccctccagaagatttcgtgctttctggacagagagatgggagatcgcattctcgagatcgcggatctcagggatgcagtcatacactctctgatagtgtgcgtttaatacgtcctgactatgcagttgcttctgctcatactcccgcaagatcgtgtcatattgggaattttttaatgccataacttctgctcctttgttatctggtctttaacagacgttcttccagagaatcaatatcataggaacgaccgttaaagttgttaaattttgtcttaatattcgctgcaggctttgaagttaccgttctgcgcttattctctctttcctgacggaaagcagtatccactcgttcgatatctgacaggacacggacatgctgtgtcagccatttggacaaaatcttatcggtataatcaaaacttggctgatggatactgctcattgtccggtcacaggcttccttgataatatctaaagtgaagccgtattgttcagtccatttttttatataggcaatctcagaagcggcaggtccgcgtccgcgaatgccaaaagcattgagtacagtataacaattcttattgtaaatgctggaagttgcccgggcttcctcgactgtagtcacatgagcatctgcccatgcgagagctactttttttatgtaatgcatactcgtatgttgattctcgacacaatattcaatcaaatattcgatcagatccgcagaaaaatgaagctgatcaaagaaataagaaatcgtatcgatatctgttctagtcaaaggtcttccgatatattgttctgcgacaaacaaaagctgctggaattccttacggtcacggaaagccttgatagaagtcggggctgttccgcgtgaatcagagatcgtatccgcacccatagtcacatccggtatctgaacggtcgaaggagcttgcgtttctgatgcagatgtgtcttcataagctggaattgcacaagagttcccggatccctcacatggcggaacagggcaaaacgcaataccacagagagaatgatcgctttcctcatattggagggaaagcagtccctctttctcccagtaattcagtgcacgcaaaatatccttctctgtgttgtccagacaatctgcaatcgtagaaatggtgagggcaacaggagaagagttcagatgtctgagcaggaatagataaactttcacaaactctccatttgcttttaccatatggcagtcgataaaatgattgtcgactaatgttgtatgattctgaccatggctgctcaatactaaactcttcatccttacaccgtacctttctaaataaatcctcttcaatgtactggtattatagcaccagaaagaagttctaaaaaggactttttattggataaatcatcattctttgtggataagaaacaatgtggataatgtggataatgtggataactatatggataacaatgattctcctatgtttacaacgtctccagctcccatagttatcaacatatcaccgtggatacatttttcttttacaaaatttttaatttcatcaaaggatgaaaaatagtaggaatctccgcctagttcacgaattgcatctgaaagagcctctgaggacatgccaagcgtatctgtttctctggcagcatagatgtctgcgaggatcacatgatctgcaagtgtcagcgcctgcgcaaattcgtgaaagaaagcttttgtccttgtgtatgtgtgaggttgaaaaatgcaccagatttctctgtgcgggtagtgctgtgcggcagaaagagttgcctcgatctctgtcggatggtgtgcgtaatcatcgatgatcgtgacaccgtcgagtgttcctttgtattcaaagcggcggtcagtaccggtaaaggacaagagtccctttttgatcttctcaaggtcgatgccgagcagtgttccggtaatgattgcggaaagtgcattggatacattgtgttctccgttgacagagaggaaaatacgatctttctttgttccgtgatcgatcaggtcgaacgaaacattccccatgttatcgtattgaatattttgtgcagtgtaatctgcatcgtgatgaatgccatatgtgatgacattgcagttcaggccggcaataatctgctcgtactgtgaaatctcactgttaatgatcagtgtgccatctttcggaagcagtgcggcgaaccgatggaaagaatgacggatatcatcaagatctttgaagaaatccatatgatcttcttctacatttaagatgattccaatctttggaagaaaatctaagaagctgtttgtatattcacaggcttctgtaatgaaaacatctgagtgaccgacgcggatatttccgccgatgatctttaaaatacctccgacagagatggtcggatccgtatctcctgcaagaaggatatgggaaatcatggaagtcgttgttgtcttgccgtgagttccggatactgcgatcggtgtcttatagttcgtcatcagctgtccgagcagttctgcacgggtaagcatcggaagctgatgttcttttgctgcaataaattcaggattatctgcgtgcacggcagcggtgtagacgacaacatcaatatcatcagttatattttcagctttctgtccgtaatggatgacagctcccagatctgttaaatgtcttgtaaggggcgattctttggaatccgatcccgttactgtgaaatgttcttttaagagaatttcggcaaggccactcatgctgataccgccgataccgataaaatggacatggaccggacattgaaaatctattttatacataaatacactccctgttcatagaaaaatttaaattaatagtaatattttacgcactttcattatattataacggtatatggaaaaaaagccaaactataattttttgtaaaatatacataaaaagttttaaaaaaaacaattatttatgtaaaaaacattcattttattacctttttatgctataatacaactattaaattacttagaaggagtgacgacatgataaaaaaagaaatgattgcaatgttgttggcaggtggacaaggcagcagattaggtgttcttacatcaaaagtagcaaaaccggcagttgaattcggggggaaatacagaatcatagactttccattaagtaactgtattaattcaggaatcgatactgtcggcgtattgacgcagtatcagccattacgcctgaatacacatattggaatcgggattccgtgggatttggaccgtaatgttggaggagttacagtgcttccgccgtatgagaaaagcacaagcagtgagtggtataccggtacggcgaacgctatttatcagaatatgaactatatggagatgtataatccggattatgtactgattctttccggggatcatatttataagatggattatgaagtgatgctggatttccataaagagaatcatgcagacgtcacgattgctacgatgccggtacctctggaggaggcaagtaggtttggtattgtcattacagatgaagagaaccggatccaggagtttgaagagaagccggcacagccgagaagtaatctggcttctatgggtatctacatatttagctggccggtattaaaggaagcactcaaggctttatcggaacagccggcatgtgattttggaaagcatattattccttattgtcatgaaaagaaacaaagattatttgcatatgagtacaatggctactggaaagatgtcggaacactgggatcttactgggaagcaaatatggaattaatagatattattccggaatttaatttatatgaggaatattggaaaatttatacaaacagtggtattttaccgccgcattatatttcagatcagtctgctgtggagaagagcattattggaaatggttgtgatatctatggagaagtccacagttctgtcattagttctggtgtaacgattggaaaaggaagcgttgtgagagactccattatcatgaaggatgctgtgatcggagatcactgtgtgattgacaaagcgatcattgcggagaatgtacagattggagataacgtcacacttggaacgggaagcgatacaccgaataagatgagaccggatatctatggatttggacttgtgaccattggggaagattctgtgatcccatccgatgtacagatcggcaagaataccgccattagtggtgttacatcaaaagaggattacataaacggagagcttgcaagtggtgaaacattaattaaggtaggtgaatagggatgaaagcagtaggaattattttagcgggtggaaatagcagcaggatgcgggaactgacacatagacgtgcagtggcagcgatgccggtagcaggaagttacaggagcattgactttgcacttagcaatatgtcaaactcacatattcagaaagtcgcggtgctgacacagtacaatgccagatcattgaatgaacatctgaattcttccaaatggtgggactttggaagaaaacaaggtggtctgtatgtatttacaccgacgattacaatggagaatggatactggtacagaggaactgcggatgcgatttatcagaatcttgactttcttaagaaatgccatgagccatatgtgatcattacatctggagatgcagtgtacaagctggattataataaagtgctcgaatatcatattgccaaaaaagcagatattaccgttgtctgcaaagagatggatgaggatgcagatgtcagccgttacggaacggttaagatgaatgattcctgcaggattgaggagtttgaggagaagccggtactgagcagatctaatatcatctcaacaggaatttatgtcatcagaagaagacagctgatcgatctgattgagcgatgtgcagaagagggaagatttgactttgtgcaggacattctgatccggtataagaatgtaaagaaaatttatggatataagattagcaattactggagtaatattgctacagttaatgattattacagaacaaatatggatttcctgaagcaagaagtgagaaaatatttctttaaggaatatccgaatgtttattcaaaagtgagcgatcttccaccggcaaaatataatccgggtgcatgcgtaaagaacagtttgattgcaagtggatgtatcgtcaatggtactgtggaaaattcagtattatttaagaaagtatttgtagggaataattgtgtaattaagaattccatcatcttgaatgatgtttatttaggagataatacctatattgaaaattgtatcgtagagagtagagatacaattcgtgcgaacactcgccatgtaggagaagatggaataaaagtagttgtagagaaaaatgagagatacgcgatgtagaagcggtgaaaggggacaaaagtatgcagattacagatgtacgagtgcgtaaagtagcaaaagaaggaaaattaaaggcagtagtatcaattacaatggacgacgaattcgtagtacatgatattaaggtaatcgaaggagagaagggattcttcatcgcaatgccaagtaagaaagcaattgatggagaataccgtgatatcgcacatccgatcaactcaaatacgagagagaggattcagagaacgattttggagcgctatgaacaggcacttcttgagggagatgtagaggaagcgtagagaacgcgatgaattaaaagcattgagatcgccgcagagatggattgagatgacatttttgcggcggtttttttgactctttgtcaaggaatggggtaaaataactttggctctttgacaagagcagggataaaaaacagcaaagctgtaaggctatagatcaagaaaggcagaaaaacgtggaaattcagagttatattttatatgaagacagagatcttattgtgtgcagaaagccggcaggtgttccggtacagacgaagcagattcagacaaaagatatggtcagtctgctgaaaaactatagataccaacaggaagggggaaaagaagaaccatatcttggggtgattcatcgtctggatcagccggtggaggggattgtcgtatttgcgaagacgccgcaggctgcaaaagagctgaaccgtcagcttcaggcaggtggttttggaaaatattatcaggcagtactgtgcaaggttccagagaaggcgcaaggacagctgacagattaccttgtcaaggatggcaggacaaatctgtcaaaaatttgcagaaagtcggatgccggggcgaaagaagcaaggctttcctataaaatacaaggggaggcagagggaaaggcactggcaaacattcatctggacacaggaagacatcatcagatccgtgtgcagatgtcggggatgggatgtccgattctcggagatgtaaaatacggaggagaggaaaaagcaagagggcagattgctctgtgtgcaagcagtcttacttttgtgcatccaaagacaaaaaagcagatgcagtttgagataccgccgcaagcagcggggtttgatttgttttttgcttcaaaaatttaaaaaagttgtataaaggacgatgggacggcaatactaacatcactaccgtgtgtcgctgactgttcaggacatgcgtggaaaagacggggctggtgatgggaatgcagagagaacagtggaagacagtgatagttgttgtgggagtcacagggggcatgtatattggaatcaagtatatactgccacttgtgctcccctttttctgtgcatttctggtagcatatctgttaagaccgcttgtcaggaacatccatgcacatacaaagctgaatcagggagctgttgccgggggtctgcttctgatcatcttaggtgtggtaggcacagcattgtggtttcttgggagcacactcgtacagcagttctgttactttattgagcactatggattttatgccggaaagatggagctgtttttagatcaatgttgtcggagcatgagcggagttttcggaatggaggcgggagaactggagtcactttttgtgacacggatggcaaccattgcagaaaatatcgaaaggcagtttgtaccgaaactgatggcaaattcatgggggtatgtcagaacgatcatcgaagtggcaggggttgggattattatttttgtgtcgatcattctgctcgtcaatgattttgacaagctgaaagagaaagcatcacatagtattgggtacagacattttgtgaagattttgaaacggatttttcatatgggaggaatgtttctgaaagcacagctgatcattatgtctgtgatcgcggcactctgtacggtgacgtttctgcttttgaaaaatccgtatgcattgctgttaggagtattgatcgggtttcttgacgcgctgccggtacttggaacggcagttgtattatatccacttgcaattgtgcaggcatttcaaggacgctttttgtttgcagcagtttatgcgggattgtctgtgatctgcaatctgacgagagaatttttagagccgaagctgattggggagcatttgggaatccctgcgattatggtacttgtcacggtctatgtgggaattcgtctgtttggtgtaagtggtgtgatcacaggtcctttcggatatcttgcggggaaagagatcgtccgggagctactgcaaaaaggagaagggacttcttgacaaagggaggaaattctcttaaaatgagcttacgaaacaagagcgaggaagaggattagtaaatataggatatgccacagagagagaatcggatggtgagagattcttgcagaagatgtattgaacctgccttggagcttctgtgtgaaagcacagcgtacatctgcgttaaagaggacagagagaattttagctggagatggcagtagccggagccggttatgattaataagggtggtaccgccgagcatttcggtcccttgcagagggattgaaaggctctttttttcattcccgatcaaatatatagaaaagcaaagatccatgcacgaaaaaagagcgcagtctattagtgggatgtgctttgcatggaacaaagaaaaggagaagaaaagtatggcgaaagacaaaaaactcgtagaagcgatcacttccatggaagatgattttgcacaatggtacacggatgtggtaaagaaagcggagctgattgattacacaagtgtaaaagggtgtatggtgatcaaacctgcaggatatgcaatctgggagaatatccagcatgaattggaccgcagatttaaggagacaggtgtagagaatgtataccttccgatgtttattccggagagtcttctgcagaaagaaaaggatcatgtggaagggtttgcaccggaagttgcgtgggtgacacacggaggacttgagccgcttcaggaaagactttgtgtgagaccgacttcagaaacattattctgtgatttttatgcaaaggatatccagtcacacagagatcttccgaaagtgtacaatcaatggtgttcggttgtgcgttgggagaagacaacaagaccattccttcgttccagagaattcttatggcaggaaggtcacacagcacacgcgacagcagaagaggcagaagaaagaacaattatgatgttaaatgtctatgcggatttctgtgaagaagtacttgcgatcccggtgatcaagggaagaaagacagacaaggagaaatttgcaggggcagaggcaacttacacgatcgagtctttgatgcacgatggaaaggcacttcagtcaggaacaagtcacaacttcggagatggatttgcaaaggcattcggaattcaatatacagataaagaaaataaattacagtatgtacaccagacatcctggggaatgacaactcgtatgatcggagctatcatcatggtgcacggagacaacagtggtcttgtacttcctccaagaatcgcaccggttcaggtgatggtcatcccgatccaacagaaaaaggacggtgtgcttgacaaggcatatgaagtgaaagaagtgctgaaaaaagcaggactgagtgtcaaagtggatgattccgacaagagtccgggatggaaattttctgagcaggagatgcgaggaattccggttcggattgaattaggaccaaaggatattgaggcaggacatgcagtagttgtaagaagagatacaagagagaagatcatagttccattcgaagagttagaaacgaaggtagcagaagtactggatactatgcagaaagagatgcttgagagagcaagagagcatagagatgcacacacatatactgcttccagcatggaagagtttaagaaactggcagatgagaagccgggatttattaaagcaatgtggtgtggatgtcaggaatgtgaggatgctctgaaggaagaggcaggggtgacttcacgctgtatcccatttgagcaggaagagatcaccggaacctgtgtacactgcggcaaacctgcaaagcatatggtttactggggaaaagcatactaatttttactgtaccgatgtatggaagataaatactttagaccgtacatgggaagtcagggggatagatcatgaagatacagttgccggaaaaagtaaatacgatcatacagacattgcaggagcatggatatgaggcatatgcggtaggtggatgtgtcagagattcgctgcttggaagagagccgggagactgggatatcacaacttcagcatccccggatgagacaaagaaactatttgcaagaactgtcgataccgggattgagcacgggacagtgactgtccttctcggaaaagaaggatttgaggtgacgacataccggattgacgggaaatatgaagacagcagacacccgacggaagtgatcttcacaagaaatttaagggaagatttgctccgcagggacttcacgatcaatgcaatggcatacaatgatacagaagggatcgtcgatatttttggcggaatggatgatttgaagcgaaagataatccgctgtgtgggaaatgccagagaacggtttggagaagatgcgctccgcattatgcgcggagtgcgttttgctgcgcagcttggattttctctggaaaaagagacgaaggaggcaatgacagaacttgccccgacgttggagaagatcagcgctgagcggattcagacagagctggtaaaacttcttgtgtcagattcgccggagttgatcagggaagcatatcatctgggggtcaccgcagtcatcttgccggagtttgatgagatgatgcggactggtcaggagacaaaataccacaggtacgatgtgggtgagcatacggttcaggcagtctgcaatgtgccgccggacaaggtgctgcgtcttacgatgctgctccatgatgtcgcaaagccggagatgaagaccgtggatgcagatggaacggctcattttaaaggacatgacatcaggggagagcagaaagcgaaagaaatccttcgccggttaaaatttgacaatgatacgatccataaggtgacaaaacttgtccgctggcatgattaccggatgccggcagagaaaaagaatgtcagaaaggcaatgagcaagatcagtgcggaactgtttcctatgtatcttctcgtaaaaagagcagatattttggcgcacagcatgtaccgacgggaagaagaactggaaaatttaagtggtcttcagaaatgttatgaggaaattgtggcagaccatgagtgtgtcagtttaaaacagcttgcagtgaccggaacggacttgatcggaatcggtatgaaaccgggaaagcagattggagaagtgttaaatgagcttctgcggattgtacttgaatatccggagttcaataataaagagcatctgcttcggtttgtgcaaaatcgatttgatatttagcggaggcttctgttttcaaggtgagagaggccattgaaacgatcacaaaatttgttgcataaatttcagaaaaagaatcatacttctgtccaaaaaatcataggctagagagaaaatcaaagttactgcaaaaggcagtggcggaaaaatgattatagggggcagttatgaaggattttgaaacagatgtattggaacagtatcatatagaagtaaaaggcacccgaaagacaagaggtgccattttatgcgatacagacagaggcatgctcttactgaaagaacttactttctcagagaaacgagtgcctcttttatataaactgtgtcaccagctcgaggaaaaagggcatggactggtggatacgattgttccaaacaaagagggagaatatgtgacaagcgctccggaccagacaaaatatatattgaaacgctggtatgggggcagagagtgtgatgtcagaaatgaggaggaactttgcagtgctactgctaatttagcatatcttcacaacctgatggctggagcggatgttctggaggaaggaacggttgtaagagagcatgatctgaaagaggagtatcagagacataacagggaactgcggaaggttcgtacctttatccgaaacaaagtcggaaaaggtgaatttgagctgttgtacttaaaagaatttgaagagcagcatgcactcggtgaagcggttgtcagaaaactggagacagatcattatgaaacgctcagacagaaaagtaagacagaacatacgtggatccatggggattataattaccataatgtgctcatgacatatcggggagtggcaacgacaaattttgaacatttccgggaggatatacagatggcagatttctattattttctgagaaaagtcatggagaaatgccaatggaatgaacggattggaaacatgcttttagaggcatatgataagggaaagacaatcagcagagaggagctggattacctggcagtacggcttgcttatccggagaaattctggaaagttgcgaatagttactatcattcaaacaaggcgtggatcccggaaaaaagtgtagaaaaattacagatatctattgcacagacagaaaagaagaatcagtttttgaaagatttattttcttttcatttatagtaacgtgttgtataatagataaaaagtgagattaggaggtaccaggatggattatcagaaaagatacagagaatggctggagaacgattattttgatgcagacacaaaagccgaactcacagcgatcaaagagaacgataatgagatcaaagaacgattttataaagatctggaatttggaactgcaggacttcggggagtaatcggagcaggtacaaaccggatgaatatttatacagtcagaaaagcaacacagggattggcaaattatattctgaagaatggggcagaaggcagaggcgttgcgattgcatacgattccagacgaatgtcaccggaatttgcggacgagtcggcgctttgccttgcagcaaatgggatcaaggcatatgtatttgaatcactccgcccgacaccggaactttcttttgcagtaagaaagttaaactgcattgccggaatcaatattacagcaagccacaatccaccggaatataacggatataaggtatactgggaagacggcgcacagatcacaccgccgcatgataccgggatcatggcagaagttgaggcagtgacagattatgctgcagtcaagacgatgagccttgaagcggcaaaagaagcgggactttatgaggtgatcggagaagctgttgatgacgcttacatggaggaactcaaaaagcaagtcatccaccaggatgccatcgaccagatgaacaaagatttaaagatcgtatacagcccacttcacggaacggggaatattccggtaagacgtattttaaaagaacttggatttgagaacgtctatgtagtcaaagagcaagaattgccagatggaaacttcccaacagtatcttatccgaacccggaggcaaaagaagcttttgagcttggcttaaagcttgcaaaagatgtagatgccgatcttgttcttgcaacagatccagatgcagaccgtctgggagtttatgtaaaggatacaaagtcaggagagtacaaagttctgacaggaaatatgtcaggatgtcttcttgcagactatgagatcagccagacaaaggcagtaaaaggtcttccaaaggacggttgcctgatcaaatccatcgtgacatccaacatggcaaaagcgatcgcagagagctatggagtgaagttgatcgatgttctgactggatttaagtttatcggacagcagatcctcgaatttgaaaagactggaataggaacgtatctcttcggatttgaagaaagttatggatgtctgattggtacttatgcgagagacaaggatgcaatcgttgcaacaatggcgctgtgtgaagcggcggcatactataagacgcttggaaagacgctctgggatgcgatgatcgacatgtatgagaaatacggatattacaaagatgatatccagtctatcacacttaaaggtatcgaaggacttgagaagatccagaatattcttgagacgctgcgcaaggagccgccggcagagatcgggggatatggcgtacaaagagcgagagattacaaggcaggtacgatcaaagacttgcggacaggagagacaagcgatacaggacttccggcttccaatgtactttattatgaattggaaaatgatgcatgggtatgtgtacgtccttccggtacagagccaaaagtgaaattctattatggaattaagggaaattctctggaaaatgcggacgagatttctgcaaaaatgggtgcatctgtgctggaaatgattgaaaaaatgttatagttaaggcgaattatcaacaagtattcagggaaaagaaccggagggtgtctgaaacatgttccgggacgtggaaaacacgaaaaattccttgacaaacaatagggaaacagttataactataacagtacaataagggtaaacagcctgcaaatgcggagggaacggcccttcaaaacggatagaatctatatatttcatatattctatagctaaattagaggaggaacatattcatgaacaaaacagaattaatcgcagcagttgctgaagcagcagaagtatctaagaaagactctgagaaagtattaaaagcttttgtagacgttgtaacagaagaattgaaaaaaggcgagaaagtacagttagtaggatttggtacttttgaagtgacagaaagagcagcaagagaaggaagaaatcctcatacaaaagaaacaatgatgatcgctgcatgcaaggctccgaaattcaaagctggtaaagcattaaaagatgctgtaaatgcataattcagatagacaatccaataagaaatagaagacaagaactgctgcgagaattgcggcagttctttgttacatgagggaaagaaaatgagattagataaatttttaaaagtttccagattgatcaagagaaggacggttgctaatgaggcgtgtgatgcagggcgtgtccttgtaaacggaactgtggcaaaagcttctgtaaaggtaaaaccgggggatgtcattgaaatccagttcgggacaaagaccgtgaaggtagaagtgcttgcaattcaagatacgacaaagaaagaagaagcaaaagatttattccggtatctgtaatgaggtatctgtaaatcatcataaatatgaacaacctttcatataattgagagaaagaagacgtactgatcatagatagaaaggttgtgggtatagtggaagaaagacaggtacaaaaacctcataaattagttatcaataaccgaaagacaagtgcggtgacaggtgtactggatgtactttcctttgatttaaatgagatactgcttgagacagaacaaggaatgcttatggtgaagggaaaagatctccatgtgaaccggctgagtgtggaaaaaggagaagtggatctggcgggacatatcgacagcatcgcttattcggatatcagccagagtgctgcaaagcagggagaaaacttcttttccaaactgtttaaataggtgatcctatgtctggaatcggggaggaagcaaatatttttattcaggcagttttatcagggtttgttgtcatgggaatttatgatatgatccgcatttttagaaggattctgccccacaatctgacagcggtgacactggaagatctgttttattggatcggaatcagcctgtatctgtctgtaaagatttatcttacgagtgatggaagcatccggtggttctttgtgacagggacactggcagggattagtctgtttgcagcgatattttcacagatgcggaaaatctataaaaaaatcaagaaaagtattgaaaaaaagagggaaacccattagaatggctttagagtagtctggaaatacacacatacaaaggtgggtaacagtaatgaagcatatcaaagaaaaaagtcgtacaagacaacagcggcagagaatgcgggcacatagaagaagtatggtgctgattagttccgtaatcatgttgctgatcgtgcttgtgtctgtcggaggggtctcattacgggcgaagaatgaagcatataaaaagcaacaggcagagctggagacacagatcaaagaagaaaaagacaggacaaaagaaattgagaagtacaaagagtatgttggcacagacgcttatgtagaagatgtggcaaaggaaaaatttggatttgtatatgaagatgagattgtattaaaaccaacaaaataataagattacaaatgataactttaggaaataattggatttcctaaagtttttttattacataggaaattttcacaaaatcctatgtaataaaaaatacgtttcgcgtgagaatctcgtttgcgagattctttgttctgttcagcagacaaaaaaggaaaagaacggacagggggagaataaaaatggagaaggctggaatgggacaggctgggatttcgggcccttatgcagtacagattggaaaactggcggattcactggaacatttatcgaaggtatttttaaaactggagcggcagaagcaggtatttacaaaagatgaactgcaggagatgttttttcaggtggaggagagtgtctgtacaaaatgtgatcatatggagcggtgttggggagaggactatgtccatacttaccagctgggatatgaagttctgcatgccatcgaggaatatggaaaagaattgaatctggaaacaaagcggaaattacagaaaaaatgtgtgatggcgccaaagttccagagcgcgctcatagaggtctttcatgaagcaaaacaaaatatgctctggtcgaaccggcttgtaaaaaaccgggagggatgtgcggtgcagatggatttgtttgcgcagatcattaaaagtacggcaaaagaatttgaggacagcattctgattgatgttcggatggagaaaaaaattcgaaaacggctgcagaaaataggggtaaaagtgttggatatgacttttctttgtacggagcgaggaaagcatgagattcacttgaatgcaaaggcagtacaagatgtgggagtggagacgaaggagatgattcaaatcatttccagaacgtatggcaggaaatttgtatttgaggaacagagccgcacaatgttgggaaaagagtatgaaccgtatgtctgtatcgagccgtatcagttccatattatgcagggggttgctaaaataggaaaaggaagagatacaatatccggagacagttttctggaagtggcgatgccaggtggaagggttgcatctgctctttcagatgggatgggatcgggcaggaaggcgtttcaggagagtgcgatggtcgtagaacttttggaagaacttctgacttcaggttttcctggggaactggcgatccagatgattaatacagcgcttgtgatggggcgtgaggaaattcatttttctacggtagatatgggaatttttgatcggtatacaggggaatgtgaatttttgaaagtgggcgcatcgacaacttttattaaatatcgcaatggggtggaacgattatcctcgacaagcctccctattggggttctgcacaatctggagattgacatggtaaaacggacactgagaagcggagaatttgtcgtgatgatgacagacggggtgttggatgctcttccggttgtggagcaggagatgttgatggagacaatcataggcggaatgaagcttgtcaatccaaaagagatggcacaatacattttagatcaggtgcttgcgtttaccggcgagaccccaaaggatgacatgacagttttggtggcaggagtgtggaaaggatagaagtgtgactggattcttttggataatcatagtatcatagagaggaaatacacaaaacgtgtaggagaacaaaagggaaaaggaacgtagatatggctgaaaaagagcaaaaaacaagagcatatcaatataagaacaaggagattcctgcgcgggtgcgagcttatatacaagagcaccggatgtttgagcggggagaaacagtgattacaggcatatcgggaggggcggattcggtatgcctttttttcattttgcattatctgcaggaagaattgggggtgaagctcgtggcggtgcatgtcaatcatgggatccgcggcgaggatgcagatgcggatgagagatttgtccaaaacatttgtgagacagctggtattcctctggaaattgtacgctgcaatctggaattaattgcaaaaaagaggaaacaatctatggaggaagccggcagaaatatccgaagagaagcgtttgagagggcggcacagaaatatggggcagccaagattgctttggcacatcacaagaatgacaatgcagagacacttttgatgaatcttgtaagaggaacaggactcaatggaatgacagggatcaaaccggtcagggatcgttatgttcgcccgcttctttgtctggaacgcagggagatcgagggatttctggaacaaaatggaatacgatatcagacagatcagacaaatctgacagaagactatacacgcaataaaatccgcaaccgggtcattccttatatggaaaaccagatcaatccgcgggcggcagcgcatttaagtgaggcggcagagcagctccggggcgtgcaggaatttctggaaaagcagctgaaagtatttaaagaaaactgtgtcagcaggaagggtgaaaaacttctgatccggacagagccttttcagagtggagataagatactcagagagatgacagtgctttcctgtatggaggaagtggcggggcaggcaaaagatctgtcagcagttcatgttgcagacgtcagcacacttttcgggaagcaatgtggaagacagatcatgcttccgtatcatatgcgggcagtgcggggatatgagggagtgacacttgagaaagtacatgtagccagagagaaagaaaaggaagtacggcaaaaaaaagaaaaagggatactgctccgggaggaggagcttccattagaagtaaaatgccgtattccgggaacggtcttttaccaaactcctaaggggaaaaagaccgcagttacatgcagaatcgtggatttggcagagaaccccggaaatatgcaaaaaagtcacacgaactgttttgattatgatataattaaacatgatttgtgtgtgagaacaagaagaccaggtgattacattgtcattgaccgggagggaaggaaacagaaattgaaatcttacctgatcaatgagaagattcctgcaagtgagcggggagagatactgctgattgcagatggaagccatattttatgggtagttggacatcgcctgagtctttgcgggagaccagacgaacatacaaaaagaattttacaaatacaaatagatggaggagaaagccatggcagagacaattaaggtattagtttcagaagaagaagtagaaaagagaatcagagacttaggagagaagatcagcaaggactacgaaggaaagcaggtacatctgatctgtgtactgaagggcggtgtgttctttatgtgcgagctggcgaagagaattaccgttccggtttctatggactttatgagcgtaagcagctatggagatggaacgacatccagcggagttgtcaagatcgcaaaagatctggatgaaagtctggaaggaaaagacgtacttgttgtagaggatattattgactctggacgtacattatcttaccttcttgagattctcaagaagagaaatccaaacagcatgaaactctgtacactgttagataaaccagagagaagagtgatggatgtcaatgtagattatgtaggatttaatatcccagatgaatttgttgtgggatatggactggattatgcgcagaaatatagaaatcttccatacatcggagttgtggaaggcgtagaataggaaggggacataaattggatagtaagaaatatagaggagccagcggtgcttcgcttttgatgctggtgatcgttctgtttgcggtattctggttttcagaccggatgcaaagtacagaacagcggtatacagaagcgatgtttcaggaagatttaaaggaagacaatgtagattctgtggtgatcaatccaaacaaagaaacaccgacaggaacactgaagatttatctgaaggatgaagattattccaagagtatgaatgtgctgaatacagaaaaagtgcaggagattcttgaggaaaatggggtggcatacaaaattgcagatatgccaaaaccttccgtatttacgacggtagtgcttccgcttgtacttacggtaggggttgtattattactgtttgtgctgatgaaccgtcaggcaggtggtggagcaaatgcaaaagcaatgagctttggcaagagcagggcgcgattgagcaccgatcgggataagaaagtgacatttgccaatgtcgcaggtctgaaagaagagaaagaagagttagaggaaatcgtagatttcttaaaagaacctaaaaaatatattcaggttggagcaagaatcccgaaaggggtacttcttgtaggacctccgggaaccggtaagacattgcttgcaaaggcagtggcaggggaagcaggtgtaccgttctttactatttccggttctgatttcgtggagatgtttgtcggtgtcggagcctcccgtgtgagggatctctttgaggaggcgaagaaaaatgcgccgtgtattatctttatcgatgagatcgatgcagttgcaagaagacgtggaacaggtatgggcggtggacacgatgagagagagcagacattgaatcagctgcttgtagagatggatggattcggagtcaacgaaggaattatcgtgatgtctgccacaaaccgtgtagatatccttgacccggcaattctgcgtccgggaagatttgaccgtaaggtaatggtcggaagacctgacattcagggaagagaagaaatcttaaaagtccatgcgaagggaaaaccactcagcgaggacgtagacttaaaacaggtagcacagacgacagcgggatttacaggggcagatcttgagaacctgctcaacgaggcggcaatcatggcagccaaagaaggaagggtatatatccagcagtcagatattcggcatgcatttgtcaaagtcggtatcggagcagagaagaagagtcgagtcatttcggataaggagaagaggattacagcattccatgaggcaggacatgcaatcttattccatgtgctcccggatgtcggaccggtatacagtgtttctatcattccaaccggagttggggcagcgggatatacgatgccgcttccggagaaagatgatgtgttcaatacaagaggaaagatgatccaggatatcacagtcgcattgggaggacggattgccgaggagcttgtatttgatgatattacgacaggagcctctcaggatattaagcaggcaaccggcattgcaaggtcgatggtgacgaaatttggtatgtctgagaaattaggtctgatcaattatgacaacgatgaggatgaagtatttatcggaagagaccttgcacatgcatcacgcgggtatggtgaggcagtggcaggaacgatcgatgaagaagtaaagcggatcattgacgaatgctatgccaatgcaaaatcaatcattcagaagtatgatcgtgtgcttcatgcgtgtgcagaccttttgctggagaaagaaaaaatcacaagagaagaatttgaagcattgttcgatggtgaataaacagaatggaaagtctgggaaatgaggttttctttatgaatatagacgcattgttctgtgacggtacaggcaattatgtgataccgccagaaccaaagaaaaatgaaaagattcgccttcgtttccggacggcaaaagatgatgttgatcaagtatttctgcttgttggtgagcagtcttatgagatggagaaaaaggaaacgagagggacatttgactattacgagatggaatggcagctgggagagaaagaattccactatggatttcaggtgtccaaagggggagaagtaaagtactttaaccgctgtggagtatccggtaaccgggaagagttctattcttttatgatcacaccgggattttccacacccgattgggcaaaaggggcggtcatgtatcagattttcgtagatcgcttttacaacggagaccgcacgaatgatgtggaaactggtgagtatgcttacatcggagagcacagtgtccgtgtggaagactggtcaaaataccctgcatttatgggtgtgcgagaattttacggaggagatttaaagggagttctggaaaaaatagattaccttcaggaacttggcgtggaggcggtttattttaatccgctctttgtatctccatccaatcataaatatgatattcaggactatgattttatcgatccgcactatggagtgattgtggaagacggcggagaggtgttgacggatggatgtctggataacagccaggcgacaaaatatcagattcggacgacaaatcgaaagaatcttgaggcgagcaatgcattttttgcagaacttgtgcaggaattccatcgacgggggatcaaggtcattatcgacggtgtgttcaatcactgtggttcctttaataaatggctggacagagagcggatctacgagaagcaggaggggtatgggaaaggtgcatacgtctcagcggacagtgattaccacagtttcttccggttttttaaagaagaatggccgtacaatcataattacgatggctggtgggggcacgataccctgccaaaactcaattatgaaggttccgaggaattacagaaatatattttgaacattgcgaagaaatgggtatctccaccgtataatgtagatggatggaggcttgatgtggcggcagatctgggttattccaatgaatttaatcatgagttctggaagaaatttcggactgctgtcaaagaggcaaatccgaaagcacttatccttgcagagcactatggagatccgagagaatggcttcaaggtgatgaatgggatactgttatgaattacgatgcgttcatggagccgctcacatggttctttaccggaatggagaagcatagtgatgagagacggcaggatctctggggaaatgcagatcattttgtcagtgtgatgaatcatcacatggcagcaatgcagacaccatctctgcaggtggcgatgaatgagttatcaaatcatgatcattcccgatttttgacaagaaccaatcacattgtggggcgagtgcagaatcttggctacaaggcggccagagagggaattaattcggcggtcatgcgcagcgcagtcgtgatgcagatgacatgggtaggagcaccgaccatttactatggggatgaggctggtgtatgtggatttaccgatccggataatcggagaacatatccatgggggcaggaagacaaagaactgctacaatttcacaaagatatgatccggatacacaaggaggaaagtgtacttcggtgcgggtcacttaagatgcttttctgggatgagaatgtgttggcatacagccgcttcacacaagaacagcagattgttgtgatcattaataacagtaagaaactaaaagaaattactgtaccggtctggatggcagaacttccgatgaaagggaagatggacagattgttgtatacctatgagcaggggtatacgatggagccggactatgtgttgatcgatcaaggagaggttgtgctgaatatgggacgacattctgcgatcatcctttgctcgagataagctttagagaaaagataagaacaagcaagcagaaaagactgtctttgtctgccgggaaaccggtggatgagggcattttttttgcagagtgattcaaaaccgggagcaaacgagattgagcctggacatgtggtggcatgtcctttatattaaaaatatattgtttgcttaggaggaagagagatgaaacgagtattagttgcatctatgatgcatgaatctaactcatttaacccgatcattgccggagaaaatgacttcggcgttgtacggggagagaaactttttgagagaaatccgaaaaatgatccgctgcgcggagtgatggatacactgcaggagcaagggtatgaagtggtaccgacactttttgcaagtgcagttcccaatggggaagtagactatgagttctatctggggctgaaagaagagattcttgagagagcgcgtcaggcacaggaagaaaagccgctggatgcgatcacacttgcacttcacggatctatgagagtgaaaggtcttggagatgcagagggatatctgttggaagaattaagagagatgttccaggacattccgatcttctcggcactggatatgcacacgacgatgactgtccgcatgcacgagaactgtgatggatttgtcggattcaaatgtgcaccgcacacagatcggtatgaaaccggggtacatgcggcaaagatgaccatcgcggcactggaaaatcatgtgcaggcaaaatctgcctgggtaaaggttccgattctaatcgcaggagagcagtcttccacaacggtagagccgatgaaaggactgatcaccaagctgcgcgagacagagcagaaagaaggaatccttgcggcctcttatctgatgggatttccttgggcggacaatgaggacagttctgtggcagtctatagtctatattgtggccgaaaatcaggaacttgccgacagcgaggcgcttcgtctcgcagatatcatctggaatacaagaaatgatttctgtttccagacagagacttatacagaggaagaaacattaaatgtcgcttttgatgcgattgcaaacggacaggaacttccggtatacctttctgattccggagataacccgacagccggatcttcctcagactgtaccggatttttaaaacgaattatggaagatcctcgtacagagcagttaaaaacaccggtcctctatggcggaatctatgacccggaggcaacactggcttgtaaaggaaaagtgggagaagaagttacgatcacattcggtgcaaagtttgatacgacgacaacacagccgattacagcaaccggaacagtcaaggcttatgtggaaaaatggaaaaagacatcaatcccttgtgacattgcattgtttcattcctgcggtgttgacgttgttcttgcagagggtcatatcggttatgtttcgccagatgtatttactgatcttggaagagatccgaaggaagcagatattgttgtatgtaaattaggatatctgacagcagatcaggatgcaatcgctaagagaagtattatggcacttacaaaaggaagtacaaatgaagacttaaagactttaaattacacgaaagtgccaagaccgatctttcctttggatgaagatttttcatatgaagcaaaggataatcttgttgtaaaataagtaaaatgtcaacacggtgacagcgttcaagaaaaggacagagtaacatagggaaatagaaaaggaaaagaagtctctgagatgtgtcggaagacttcttttttcttgagaatgaatgtgatataatgaatggaatatttagaaggagaaaagatatatggcgtttacaactgtttttttcttatttgcagtgatgccggcatcggttgcgggctattatctgataaagcttttgggaaatagaaatgagaagtggagcgactggctcagcaatctgtttctggttcttgtaagcctttgcttttatggatgggccagattggagggaattgcccttttgagcatctatgtgcttggagtgtggatggcaggaaagagaatctgttatttggaaaagaaagcaaaatacaagaggaaggtgtgtttcatgacactttctatcctggctgtgacaggcattttgatctggtacaagtattacaattttattgcggaaaatctaagtcattttttcagcatcagtctggcgatgagtcagtggatcgttcctcttggaatttctttcatcacgtttacagcgatatcctatcttgtggatgtctttcgtggagatgcagaggcgggaagccttttggatgtatttttatatctttcttttttcccgaaagtgatttccggaccgatcgtacagtggaaagattttcagagacagacggtacaccgcagggtagatgagaccgaatttttagatgggttgaatcggatcatgatcgggtttgccaaaaaagtgattttggcagattcatttggggctgtgatcagcaagatcgatccatatatcggagtgggaatggatgtaccgaccgcatggttgtttgcatttttttatatgatgcagatatactatgatttttcaggatattcagatatcgcgattggtttagcacagctatttggatttcgtttcaaagagaattttcagtttccatatcggtcaaaatccattacagaattttggagacgttggcacatttcacttgggacatggttccgatcatatatttatattccacttgggggaaaccgaaaaggaatgaaacgaacattatggaatctgttttgcgtatttttgctgacgggaatatggcatggagcggcatggaattacattttatggggtgtgatcaatggagtctgtgtattggtagagcgctgcatacgggaaaaacgtttctatcagaaaattcctgctataggtaaatgggtcgttacgatggcaattgtattttttagctggcaggtgttctacttttcagatttcagccggctggaggtgtttctgaaaagtctgttcgggctcagtgcagcgaatgcagcaagtgcagtggaatatacctatcagcattacctgacaataaaattgattttcttatcagtcgttgcggtacttggggcaatcaccttttgtatgccatgggcagaaaaagtgaaaactttttttgctcggacaaagacgggactttttatcaaagagacaggattgattctgctgatgatcgtatctgtgatctttatgatcaatagttcatacagcccattcctgtattttcaatattaagatgcaggtcagaattggttaggagaagaaaatgaaaaaactaaagatattttttattgtaatattttttatactgctcgcaacccctgtggtgacctttcgcactgaggaaaatgcagtttcagaggtggataaccggatgctcgccaccaatcctgtttcggcaatacgggagggggaagatgccactcaggcaattgaaaattatgtaaatgaccgcatcggactgcgaaatgagatgatcgaactttacactgtaggtcatgataagatttttcatgaaatgatccacccgagttatgtatatggaaaggatgggtatgtatttctgaatacaggaggaaatccaatctttagcgattaccatatcgcttttgcagatatgataaaaaaaatccaggattactgcgaagcaagaggagttccgtttctattcgtgtttgagcctgcaaagacaactgttttgcaggagaagcttgagcaggggtggaattatgacaatcagtgggtgcagcagtttttgaaagagttagacagaagagaaatccgctatgtagataatacggagatactggaggaaaagacggaggaaggagagaaggtatttaacaaaaaatacgatggagggcattggaatgaactgggtgcattctatggagtcaatcatattttagaaggattgagtgagcagggagttcctgttcatatcaacacgaaagaagaattttctgttcatgaagagacggtggaaaaattgttgctctcagagattccgattcatgagaaagttcctgtctatgaaagaaacgcagaagtcaaatgtctgacagaacagtacagcccggaagtcagaagagataaaagttttaatcatttcaattattatgtaaatgagcagaaagttgccgaaggggtgccgagaacacttgtttttcaaggaagttatttaaatggtctaggttctaaatttttggagaacagtcttggagaatatatttctgttcatgattatcggaacatttttgactttgattattattttacgatgtttcagccggaatgtgttgtttttgaagtggcagagtatacttttatagaagactattttccgtatgagcagataaaaacgatgaatctcccaccggtgttagagtcatttgaggagatgccggaggaaaatcttacgatgccggagacgatgtatcaagtagaagaggggcaaatctatgaagtaatatcgatagaggggctttcggccgatacccaatatgcatatttgcaggaaggggatcaggtatttgacttgatgagaagagaagacggagtttacacaacaacagtggaaaaacagctgttaaatgtggataacatttctataattgctgtggaaagtggaaaaaaagtctgttatcataaagaaaacaggtaaatgcagagggagaaatctaggaagggtaaggagaaagtcgtatgaagaagagaatgttgctattgtccatgtgcctgatgcttgcggttattccgggatgtggaaaaagtgggaaacaacaggaggcatctgtaaaggcaagccagtcagatgcaaaagagcagaagagtcaggatatgaaaggatcagaggagagtgcatcgtcggaggagatccctgcaaatcagaatcttctgaccggagttttggatctgacagagggtgcgatcgggaaacgtccagtggcagtcatggtcaataacgtggatccggcgatgccacagtatggggtcggaaaggcagatattatttttgaaatcccggtagagggggatgcgacaagatttatggcgctgtacggtgattatacggctgtcccgaaaatctgtgcgatccgaagctgccgcgcatattttccggcgctgtcagaaggattcgatgccttttatgtcaactggggaagcgatgacacaatcggagaatacattgcttcgctgaatctggaccagattgatggaatcagtgatggaagcggtctgttcggaagagatcaggcgcgtctaagtgcaggatatgatctcgagcatacaggatattttgatggtactcagtttgccagtgtcgtgcagtccagaggattgagaacggatatcgaggaagataagaaggatgcggctttttcgttttacggactcaatgagcaggtaaaaccggacggagaggattgtcagaaagtagatattaattttggagctgccagagcgacacttacttatgatgaagcaaaaaaagtatatgtcaaagacttaaatggaaaaccgcagatcgatggaaatactggagagcagcttgcatttacaaatgtatttgtcctggaaacatcgattacagtgagagatgagattggacataaagaggtagactgggatggtgccagcgattcggttggatactatatttccaacggtggtgtgcagaaaatccactggtcaaaagaagaaaaaaatgagcagtccaggctgaaattttatgatcagaatgggaaggaaattaagatcaacagaggaaagagctatatcgcagtaaattacgccgatcaggcgactttccaataacagaaaaaaatacgtcttgcagaaatgctgtgattttcacataaggcagtcacaatttctgcggagacgtattttttatttagatagtatttgaagcagtgcttaggggagaacgaggttacatttcatctgtcaggatgtcatgatctctgagtaatttttcaattaccgttccttttatcacacggatcagtggtttcttcagtgcgtttaacggtcccggaagctgaatgtcgagaggggattttccatccatgagcttgacagagctgtcgagcaggtcgcggatatcgtagacactgccccatacttctggtacaccacggtctacgccgagaagaccgtatacggcttccatcgcagtacgaacagaatattctgttgtaaatactgtgtcgcgaggagtatcggcaaactgtccaaggaatgcaaagtttacacatccatccgggatgacatccggccggtctccctttgttcgaggcatgaagaatgcagtgatatacggcatcattgtcggaacacagactgcactctgttctgccagttcaggaatctgttctaccggaacaccgatatggtacagccattcttccgtgatctcctttccggtacattcccgcatcggtttcttgacgaaatctcccggaacatcggtaaatagtccatatacccagacacatactttatctttatcctgttctttgaattgtccctgacggttgatggtccaactcatgagccatttggaatcctggcagctcacgattcctccggttacgacttttccactctttggatcacgtttacagatctttgtgatgtaaggaataatcttatcatccagtgttgtgatcgttgcagattcccagtttgttttggaaatatcagagcagaatttctcaggatgtccaaaagatggatcctgccgtgcgatatttttccataagttccagcatccactcgtgcgtacttctgcatcgccatttggtgcatggtcctggtcaccgtaaatcgttccttcggtacagcttccgtttgtcacaaagacaagatcgttctctgtaagcaggattcccttttcgacaccttttaccttgcattcaattgcggatgcaattttcttatgatctttaaattcaaagacaacattcgttacttcagtgttgaactggaagtcgacacctgcatgttccaaatatttctgcattggaagaatcagagattcgtactggttgtgttttgtgaatttcagagcactgaaatcagggagccctgcaatatggtgaatgaagcgctggaaatacagcttcatttctaatgcactgtgccagttttcaaaagcgaacatcgttctccagtatagccagaaggtagagttgaaaacttcgtcatcaaagacatcttcgatggttttgtcatagagatcttcgtcttttgtcataaacagtttcatgatctctatgcagcctttctgacttaaattgaattttccatctgtgtgtgcatcttttccgcgttgtacggttgcacggcaaagagaatagtttggatcatgcttgttgagccagtaatattcatcaagaacagaagcgccaggggtctcaagagaagggatactgtggaagagatcccaaaggcattcaaaatgatcttccatctctctgccacctcgcatgatatagccgcgggaaggatcgaaaattccgtcgcaggctcctcctgcaatatccatcgcctctaaaatgtgaatatgaggtcccggcatctgggcatctcttacgagaaagcatgcggctgcgagtgctgcgagcccgcttcctacaatgtaagcgtgtttctcatcaactccgtcaggtttttccggacgtgcaaacgcttcataatttccgttggaatagtagattcctttgctgtttttctcatgcttgcctcgctctgtgttccgatagtcggaagatttggaaacactttttgaggaagcagtgtgagattctacatcggattttttctttaataaaatggcggcgcctgctcctgcggcaactgcggaggcaacaccgatcgctaattttttctttgccatatagatgaccacctttctgaaataactacattgctttcttctgtactttcagcatagacgttcttttcttttgtggcaatttacaaagagagggagatgattatttttttatcattccccttgttttgtaaaattatgaatggaatttgcaattgttccgtgcatggtcacgcagatattatgtacgatttcttcataattttctttcatgccttgtttgatccagtcgagcataagaccgacaaagctgtatttgtaaaattctgcaataaatttctttgcatgttcggagattggtgtctgggcagcctgttcttcgacgacaccggcgatcagctcgtaagtaaggtgaaagagatagttttcaatctgttcccggctgaggcagcggtaagcatttaggatgaaaggtttattttcaaaaacgacttcaaaaatctgaagaagtccttcctgccaggtgtcataagttttctttccctgaagtgctttcgttgcatcttccaggcatgaccattctacaagatcataaatatccttaaaatgatagtagaatgccatgcggctgattccgcagtctgatgtgagatcattgatcgtgatcttgtctaggggtttttttaataagagtttttttaatgatgcttccagcgcgtatttcgtaatattggacatttgccattcctccagatcatccgcgataacaggcacggaggaaggagtcgcggatttccgtgcctataaaaaatgatattttacaaaattggaaaatgattttgctaagataagctaagtatagcatacaaacagaaggatgtaaaaatgataaaaaattgcttgcattttcagaacagatatgatataaatatatactagttgaggtaatttgcttcaagaaaatggatggattcccgagtggccaaagggggcagactgtaaatctgttggcaacgccttcgaaggttcgaatccttctccatccattgatcataaggaagaggtaaagtaaccggtttgctaaaaccaaaacggttcgaatccttctccatccatttaaaatactttgtatgccgcagtggcggaacaggcagacgcacaggacttaaaatcctgcgggacttatactcccgtaccggttcgattccggtctgcggcattattgaaaaaagtggaagaaacttttgattgagtttcttccactttttttgtgctgttttttgggtatgcggaatcggatgtgtgtcggtagagttaatcgcgatatatctggagaaactgttcccggacactctggatgtaagaacggcttacaggaatctgtcttccatctttcaggcagagatatcccggcaggaaagcagataattgttcgaggttgatgagatagctccgatggcataaagtgaaggaaggggaaagctgagctaaaatagaggagagcttttctgccgtgtaaaaagtatcatggagggtgtagacagccgttttccggagtagccgttccatatagcagatatctttctggagaatttctgttttctttttgttccaggaaagagtcagaatcagatggctgtgctcctcaatcttttgcagtgctttttgaacggcaggttttagataaagttctaattccggtttatagatgaagtaggtatgtgcagtctcgtaaaccgggctgacatattttagatattgactgacaaagatgatctgtatgtccgggcagtattcagatagtcgtgatgagagagtgattcccgatgcatcaccgagctcgatatccataatcgccagatcatagatgatatgggaatcctggatatctgacagcatttccttaccggatgtatagtgtgtcagagttatattctttggaaggacagctgtcagcagttctttcatcttgtttgcatgtgtttcaatgtcttcgcaaattgcaatatgtatcatttgaaattggatacctcctgttttcctggtaattgagaatgatggaggaatcaaaagaatctccctgatctgtaaagtgacagattcctccatatttttcaacgattgtctctataattccaagaccgaatccatgacggattgcagcagattttgtagttgttttttgaaatgtccgagccggtgtttttgtattttccatatgaatgcagagcatggttccctctgtatgaatttgcagatggatttcaggtgtagctttttcagattggatacatgcttcgataccattgtccaatagattaaatagaatgcaggatagttcggatgcagagaaatttttcaaaagctggagatccggaagaaggatctgataattgacagaaattccataccggtgagcctcctcttgtttgaattgcaggacagcgtttatgtaagaatctgcacaataggaagcaggattacttctggaaggacgaagtaagagtgactccagagaagaaagtgcttctgtatattgctcggagcggattgctttttgtattgtttccagatgatgatagaaggattttttgttgtggatagtatctttctgcaggttggataattgttgctcctgaatggaggatacttcctgctgttgctttaacagagcaagttcgctttttgtgttctgttcttttaccatctgaaaaaaaccgatcccaaagaataagatagcggaaagtgatgccgttgcactgaatagttcagtgatgcaaaatagcagagaagtagtggggagagatagaaaagcaaggaaaagaccacccgcggacagaggcatcaatagtaggcttaaaaagaaaaagattctatatttcataagctaatccgcctccttttgtttcataagttcttcgagataagcagatacttcatcccagtgaccatcctttgccagatatgtcattgtggtcaggtgattagaactgtcatgttcccagcgccggatagcacggtatttttgctcaagtgtccgtgtatattccgattgactttttgacttctgtctttgcagaagaagagattgttttctctgttctgcttcttcaaagattctgcaggtttttgaaatataaaagaaaaaaaacagaagcaggataaggctgatgcctacatggatcaacagggtggagggtttgtcgctgtctatctgggcaaataaaatatttgacagattgtacatacagataataggaaggattagttttaaaacagaagattccgggacaaatccataataatatctgagctttggaagcaatttcttatagaagaaatataaacagaacacatacacagaggtatatagagacaatgttttgaagtcgtagtttaaaaacagcattgtactctcaagtgtattatctggaaatagaatatcagcgacactgatgatcaacataaaaaaggattcgatcgctatcaacatcagataaaagagaaaaatcaagtttacttttgtcaaaagccgtccctcgaaaaagggaaaacaagtgatcagctgaaaaaagatcattgcaaagcagatataagggaaagattcatcaggaatcaaagaaaccagtatagcaaacacacagcacagaaaaatcaggcagagtgtagagtgtctgcgaaagtattttttcagaggaaagaagaaacggcaggtgagaaatgaaaaaattaggacaaccagctgtatcagtatgagaaaaaatttactcgataagatcataatagatgcttcctcctctttttctaaaagtttaaatccgaatctattatatcacagagggaagcagtgagaaaagacaaggtaaggttatatattacatatatcttgaaatccatgacgtgatcatacaaaacgatatagggaagtagtataatcatgaaaaaaacagaagaaaaaataggaggaatgtatatgaaaagaaagaaacaggagaggcgaaccagaggggtcatactgacgattgttcttctgctcatcctatttatttttgtagtggcaggtttgctgaataaacgtgcggaaaaggagagagaggaagcgtatgaacagaagacactggaggaggcgcagggagtctgtgaggagtttctgaatgcatatcaagataaagatggcgaaatgctgacaagacttctctggaatcaggggtatggagaacctgtggaatttagtgaatatatgaagattgcggcagatcatctgtcttatgagattggaaaagcaaagaaacataaagatggaagttgttgggtttcagtagaaattacaaatctggatcttcctgccattgcagagttggagattgaaaagaagacacatttaaaatcagattcggggactgcgctaaatgattttttacatctcctttcagattgggatacaaaaaatctgggagaaatgccaatgaagacgtataaagcagacatacttctcaaggaagaaaaccttcagtggagaatagagatgaccgatgaattgtcagatgcactgcttggggggtatgtggaactttacagtgaagtcgtgaaagagttggagggagcacaatgagaagaaaacggatatggggaatgatacttgctgtctgtatgcttgtgcagccgattagtgtacttgcagaagaaaaggagcagaacggttatttgaatatacgtgagtatgcgaccggagaaaagacacagatttatgtaaaggcagaagacaagatcatttatgcacagccgcaagaaatcgcacaggtctgtggggcagttgtagaagaaaaagcatacggagtcgacctaaaccggaatggctatatggtgaggatcaatgtagaagaagggacggcaacattagaaaatgagattggaccgatttcaagacagacctttccgctggaatgtaaggtgaaagatgatgaaatttatcttccattggagaagacaatgtacctgctgaatgcaggatggcagatggatgaggaaacggttgtcgtagatgctccgaaagagactctttggaatcttttgaatgatttcccaaaactggcaaaaatgcgcccgcttgccgaagatctttatggcaatcatgtatatgagaagagttttaaatatgtgctgctggcgctgggagatgagattgattaccggattattttatcagtcatcggcgaaagaatgattgagaaacagcagtgcgagaaagtattatatgatcttggaaaagacgattcaaaatatctggaaggaaaagacgatatttttgcagatatggaaacactgttgaagatatttaaagatggatatgggatgttagagggacttggaaagatgccggaagacttgtccggtattttgaaatatatggaaaaaagaaatgggattccatttacgaagtgggatgtgattccggaagagtggcttacaaaattaattaaaagtcaggggagtgtgtcgcagacagcaacggatctggatattgcactgcgcttgtatacagtgattgaggcggtccatcgcctagaaaactggcaagagatttactgtgatcagctgaaatcacttgcagacagtgatatatcctatgtaaagagagcaggagaaagagcagaaatgcttcaggactctgcaaaaaggctgtatgagaatagttctgattcggagaaagaattatggcatcagatcattctccaggtaatggatgtatttgcctctgagctttttaaaaaggttccggtcgccggaaaagcgttggaagtctatgggatgattgttcctgtggcctctgcaatcccagagatttctaaacagtttgatctcggaagcgatgcgtatgatgcggatgtactgctggatatcggcgcaatgtcactgcacaattgcagttatgtattaaatcatgttgtgaatcagcaggcaatcacaatcgagcagctcaaggaagcaagggcaaactatatgctgatgattcggacttattttcacacatgggatcgcatcggaaaagtaagagaggcagaagggaacccaccttctgcggatgagattgatgtgacgaagtgggatactgtgcagttagaaatgatgaatcttcaggaactgatcacgaaaagttatgagctgatcataaggatgaatgagagtgcaagatatgacagtgcgcttctgttaaatacagaatatacaaatttatacaacgaaaaaatagaggatggcattgtccgtcagaagattccgctctctctgatcacagaggaacgtatgcaggcagaaaatgaaggtgtgggaaatgtgattcaaggagaggatggctccatctattactggaaatatcagaagagcagttttgaagagactggaacgctggcacagtatcaggcactgccaggagtgagcaatgcgctgatcaagagagatccgtctggaaatgaagagacggtcttcgaggcagaaggcgccggggagatcgcagttaccgacgaaaaaatcttctatgagaagccgatcgacaatatgtcagtgacaaagatttgcagttatgaccgaaagagtggagacattacagagatcaaaaaaggaaaactgaaagcggcgacggagaaatatattatctgttcggatccgaatgaggaagaaatctatagcttgaacatttctaatgaagaggaaacgaaattaggggatggaagttatcttgcgattaaagatggatttatctactatcagctggcaggagctggcaaggataaagtaacactggcacgaatccagccagacggaagtgatgataaagaactatgtactgtggatctggaagagcacgtagatgaggatgaccttgtcagcaatgcaacaatcgcattcatggtatttcagggaaaagatatttatttttcatatggaaactatgggggatcagcagtcatgtatcagggtggaaagattgcgaagtacagtagtgaagaggaaacggtagaagacctgacgccggaagagtgggatgagctgaaggcagctgactttgtggtcaatgcagatggaacggtcgacaaagaatacatcggaaatgaactgaatgacacatcgccgatggcggaatattatactgcagatggaagtgtattctattatgcggaaaatggagctccggaagagatcatcacgcaggaggattatgcttcggtcggagaaggaatctgtggacaagcgactgatgatactgcgcttacattaaagtatgtggaaaaattcggagaaaaggtatatttcttcatggattccggtgaaaagcaaatcagaggtggagcaggatggcgctattcttataagctgcagagcggagcgatgctggagaaagatctgtcgaccggagaagtgaagacattgtacacttattaaagagagggggcgtatgagagtgaaaataatacaaaagacagtattgaccttttgtcttctggcactggtagggttctcggctcctatgctggtccatggagcggaagatagacagagtacagattccgatttccatatcgataaggagggatgcctgaccagttataccggatcggaggagcatgtggtgattccagagggagtaaagcgcatcggaggtaatccggataacagtatctttgaggatacggagacagagataaaaagcgttgtgataccagatagcgtaatcgaaattggcgagagggctttttacacttgtctgcagctggaagaagtgacgatgggaaatggggttaaaaaaatcggtcaagaggcttttgcgggttgctttaaaatgaagacgattcatttgtcagatagtttgcaagagattggtctgagagcatttaacttttgcgaatctctggaagcactggaactgccgtctagcctgcgaaatatagaaatggaagcttttggaaattgtattagcctgaaaagtctgaacattccggatggggtgcaggcaatcccgccaggtacatttgatcggtgttccagtatggaagaactatatattccttccagtgtaactaaaatcggagcaggaagtaaactgatgccgcagtatgttggggagagaaccggtttggaggattgtgataatttgacaatctatggcgcagcaggcagtgcagcggagaagtatgcacaagaaaaagatatcacctttgtggaggatgaaagcatgcaaagcactgtgataccggattccgaagaggaggaactggaaacgcaagaagaggtggaagaagaggaagaagcgatagaggaggaaacagataaagacgaggaagagaaaaaagaaagtacgcaaaaaacacaaagtaaaacttctgtggacagagtgcagattgttggattgacagtgggggcagttggtctggtgatgattctgatcgcagttgtgattcagatcataagaaacagtagaagaaaataataggaactatagaaaacaggtacagagatcacagggaagatgagaaaattttcccgtatagttgtgagatgtacctgttttttgttggaaagaaataaagaaggtgcgatatttcatttataatgaaatgctatttgtctatcgcaagtttatgccggatttcccgcggtgtacatccgtagatttctttgaacatcttgttgaacagtttgtagttcgtaaaaccgtgtcgttcgacaatttccatgataccgtcctccgtgttgcagatatcatggtaaatatgaatcaggcggatctggttgacgtaccgcgtgaacgtcacaccgaggctctgtttaaagaagcggcagaaatattcccggcttagtcccagtttctgtgcagcttcctcaagggagattggcttactgtaatgatcatctacataagaagtgatcgcactcaatcggtcaaggctcccgatattttcaggaatcagtgattcttcggcagggcgggcaaaatgtgtcaggatcaaatagagaacttccattgcgatggactcacattcgaggcggtagccaagaggctgctggacatggagtggtggaagttttttcagcaattcgcagatctggagatagatatcgagcttctctttgacgaggatatcccggctgaactgtaggttcaggtggtcaagatcagggatatatttttgtaaatgctgacgggaatagtggatgcagagccccatcgtcattgtggcacatttcgattcgtgaatctgattggagtcaattaagacaaaatctcctggaacaacgagatgtctgtgtccattgatgctcatttcggcagaaccgtttaatacgaagatcagttccagtggagaatgccagtgaggcggtgtatagtaacctctctctgtataatacttgatagcaattccagtatcgtccacgttgtataattgtttatatttaaatgcaatcatgtgataatagctccttatgtcaattttgacctaaaagtagtcaattttatatctaaaaaacaatatagtagtatgataacataatacacgtagcaaggaaaagttaattataaaagttaaaataaaggagagattattatgtcaacaatcgcattaaacaatcagaacgtatatgtaaacaataaagctgagaaaaaggtagaaaagaaaatgtctgtatgggcaaaaatcggagcatttattatggaaaatgcagatgcattagaagcatatgcttgtactttagacggaagaacttatgtcccagatcacaaataggatggggcataagcaaatggaaaaacaaaaagataaatgacagcaggaacaactttaacaagtgtcctgctgtttttttgtggaaaaatcatcagaatcttttttttactggttttgaccttttagttcttttcgaagtgcgccgggagtggtgtgaaaatgttcgtgaaacatacggcgaaatactctgtaatttttaaacccatggatttccaacagctgatagagagggtaatctgtggaggtgagatcctggtaaatatgggaaaggcgaatttcgttaatatattccaaataagtgcaccccatatgctttttgaaaaagcggcagaaatattcgggttgcagagaggcaatatttgagatctccggaatagagatctgcaaatggtaattctgcttagtgtattcgatcaccggctctagaagagagagacttttaaaacgacggtcggtaaagcgaagcggcagctcccggcgaaaatctctgtaaagatgatagagaaaatcaaacagaaggctttgaaaacggagtgtattggcagaagataaggatgctttgtcggtagctgagatcatattttgcaggattgttttgagtgtatctagtttcgccttcgcttcgtggtcttgtgcaaagacaggtacatcgaaaaaaatctttggcatatccggaatgtattttttgagaaggggatatggaatctgtataagaagacttttggtattcttcacgtatctggtggcatgtattactttggaattgataatgatacagtctcctgactgcagaaggaaagtctgaccatcggcagtcacctcaaaagtgccgtccagaacaaaattaatctcaagtgcattgtgccagtgaggcataatgtagatatctgatgcatgaaaaagatcaaagcggatatccaaattgtgggaaagttcaatgtgctcatgtgcagcggaaatttctgttgacataggaagttcctccttttttataaaaaatgaaagagtatttacaatcagcttttttatttttcatttcttttcacatattctctataatatcacaggaaattgcctgaaacaatcgaaaaacaattcccaaaagataaaatcgacctatataaaagtaaggataaggacttacaaaaaaagtgtatgcggtagtataataaaaaaacagagtgtattcgatcagattggaggaaatcgtatggacgtaaaagaattagttgcaaacatgacactggaagaaaaagcgggactttgttccggacaggatttctggcatacaaaagcagtagaacggctgcaaattccggcaatgatggtcagtgacggacctcatgggctccggaaacaggatgagagcggagatcatctgggaatcaatgaaagtattaaagcagtatgctttccggcaggatgtgcgaccgccgcttcttttgacagagagcttctctacaaagtaggagagacactgggaaaggaatgtcaggcagagggagtcggggttattttaggacctgcggtcaatattaagcgttctccgctctgtggaaggaactttgagtatttctcagaagatccttatcttgcgtcagagattgcggcaagtcagatcaaaggggtacagagtaagaatgtcggaacgagcatcaagcattttcttgcaaataatcaggagcacagaagaatgacttcgagctcggaagtagatgagagaacgctgagagagatttatcttggtgcatttgagggtgcagtgacacaggcaaaaccgtggacagtcatgtgttcttataacaagatcaatggaacttatgcggcagaaaacaaaacctatctgacagaagtacttagaaatgaatggggatttgacggatttgttgtcagtgactggggtgcggtcaatgacagagtgccggatctggaagcaggacttgaccttgaaatgccgacttcctttggattaaatgacaaaaagattgtggaagcagtcaaaaccggaacactagcagaggatgtgcttgatcaggcagtcgaacggatcctgaacatcgtatatcgctttgaggagaaccgggatgcaacagcagtgtttgaccgtgaggcagaccatgcccttgcgagaaaagtagcttctgagtgtatggtacttctgaaaaatgacggaatccttccgctcacagaagagagaaaggcggcatttatcggagtatttgcggagaaacctcgctaccagggtggtggaagttcacatatcaatgcctctcagacagaatctgcgctggagatggcagcaggatatccggttgtatatgcgaaaggatatgacacgaaggaagatcaggttgatgaagaactcgtggcagaggcagtgcgtgtggcaaaagaagcagaagtcgctgtgatctttgcaggactgccggatgcatttgagtccgaaggctatgacagacagcatatgcgccttccggaatgtcagaactatctgatccgggaaatttgcaaagtcaatgaaaatgtagtggtagtccttcacaatgggtctccggtggaaatgccttgggcagatcaggtgaaaggcattttggaagtgtatcttggcggacaggcagtcggcggagcgactgtggatgtgctttacggcaaggtaaacccgagtggacatctggcagagacatttccattgaaactgcaggacaatccatcttacttatattacgtaggagaaggaaataaagtagagtatcgagaaggtgtgttcgtcggttatcgctattatgatacaaaagagatggatgttttattcccatttggacacggactgagttatacgacatttgcttacagcaatatgaagttagataagacggagatgaacgacacagagacactgactgtgcaggtagatgtgaccaataccggagatcgtttcggaaaagaagtggtacagctctatgtgatgcctccgaaaggaaatgtgatccgtccggtcaaggagttaaaagggtttgagaagatcggattacatccgggagagacaaagaccgttacatttacattagggaaacgtacatttgcttactatgacacagatctgcatgcatggaatgtagagagtggaagctatcggattgcgttggggcagtcttccagaaacattctggcaaatcaggaagttcaagttcactctacaacacagaaaagaccagaactgactatggataccatgtttggtgatatcatgacaattccgggtgcgaaggaagttatggcagaagcaatgggagcaatttctgtttttgatggaatgcaaggagattctcttggagagggaaccggagatatgatggaagccatgatgcgatatatgccattgcgtggactgaccgcatttggcggtggaaaactgacatttgcagaggtggagaaactactggaaagattgaagaacttatagatgagtatttataggcagaaatgatgtcagaaaaagaatccggggaaaatagttgtgccattgaatggtggaagaatggagatttgtatggaagagcaggagaaaaaaccgagagagttttggtttacacttttccgtaagggagaggagcggccgctctggcacccggagttggaaattgtatttttgatgaagggaactggaaagatttattttatggatacaaagagaatgtatacagtccgggaagaggatatctttgtcatcaatagtttcgagatttcaaattttgaactggaagaagatgcgatcgcgctgtctctttttgtctctctccggtttgcggcggacgtggatccggaatttttacaatatccggtaaactgtcgttcctattttcattctgatgggaagcaggagcgatttgaccggctgcgcagagaacttgcagatacttttcaggagcagtataagagcagaaatgtctccttgtattcaaaaagcaaggtgattgcagtactggaagaattaagcagatatttctcaaaaaaagaccagatactggatcgcaggagcagatttgaatctatccgcgcagtggtaaactatgtgcaaatgcattataaggagaatattacgctggaaaatctagcacagcatacatatctgagcaagacgtatatttcccggagttttacaaaatatttcggagtatgttttacggaatatgtgacgctgctgcggttgacagctgcgggaaagatgatctgcggagagaaaacactggcagagactgcttatgagagtggatttccaaacgcaaatgcgatgatccatgcatttaaatatcattatgggatcacaccgggagaataccgaaagcagaagctacagggagcagagccggaagcagtacagcagatagttggacaggaggaaagcagagatctctttgtatcgctattgaagtatgcagatcgggcagtcgagtcagaacagacaccggagaagatcaggaatattatcgtagatacccacagcagaaagcaacggaatattccgcactggcacaggattttgaatgcagggtatgcaagatgtgtgattgacggaacaatccagagagagctacgctatctgcaggatcatgtcggctttgagtatatccgggtgaaagggattcttggagatgatatgtgctttatgagacgggacatgaatggagagattgtcacgaattatacatatatcgatgaggttttagattttattctatctgtcaatgcaaagccaatgcttgaattcagtgaaatgcctgaagttctagcagaagagccagtgtttcgctctatgagaccaggatgtttttcagcgcccttgagcatagagaggtggcgaagtgtgatacaaaatctaatgaaacatctggcagatcggtatgggatccagaaacttcggacatggctgtttgctccatggtttgctccggactttataaaaattggattgtgtaccccagaggaatatgaggagatatatgctacatcttatcaagaaatccgggcaatcaatgaaaatctgttgattgtaggacctgggacaatagattatcagaaatatttgaaaaagtttctttctatgtgtagaagaagacagtgcatgccagatatcatcacttttcgctcttttgcatcgggaaacgagcaggatgatgagttgaagctaatcggaaataatgagagtttttccacggcagttagtgcagacgaaaacctgattaaacatgcagtaaaatcaatccgaaagattctgaaagaggaagggatagaacaatatccgcttgtgttggaagaatggagcaacaatgtttggcagagggatctatgcaatgatacctgctataaatcagcgtatttgttcaaaaacattttggaaaacaatcagagtttaaatgctatggggtatttcgctgtaaatgaccgattggatgaagtacctccgtcagccagtacatttcatggaggatttggattgttcacaaaaaatgatattccaaagagcgcatgtagggcgctggaacttttagggcagatgggagataaattactagcaaaaggggatggctattttattacaactcgtgaaaatgagatccagatttttctctataattactgtcattatgatttattgtacagatatcgacacttggtcaatatgagcaagacagagcggtatggagtttttgtggaaaaaagacggcaggcgttttttatccggctggaacatatggaaagcgggagatatgaagtacggcgctatggcattacaaaagaagggggaagtagctttgatgcatgggtcaaaatgggagccccggatcccatggacgaagaagaaaaggaactgcttcggcatgcttcctatccacggtatgagcggcagcaggtagaagtaaatccggaagaaggattgctaaatgtcaaggaaaatttagagccgcttgatgtatggatggtcaaaataaagaagatataaagagaaagagcaagagaacagagaaatattgttcaatcttgctcttttttttcattaatcttgcactatttgaaaaaagaaagaaagtagaaatagaaaaaaggcaacaaacaagaaaaaagagggaagagaactgatagaaaatacacagaaatgacacatataatgattgtagagaaaaaacggaggaggaaaatttttatggagaaacatttaaacaaacaatcaggaaagtatgtggagaatatcagcgtttctgaaaaaatcgcatatgggggaggggacctggcaagtaatctgatacttgtgcttacatcaacatttgtgacttttttctacacagatgcattgggattaaatgcggcgatcatcggaagtattatgatgttttcgcggtttgcagatggatttacggatattttcatgggatatgtgatggatcgtgtcagaacaaagcacggaaaagcaaggccgtggctgttatggctggcagtgccgatcagtgttgctacaattctcgttttccttgtgccgaatatcggagaagcaggaaagtatgtgtatgtgacgattacatataatctcgtaacaacattcttgtatacgatgatcaatattccatatggagcattgacttctctgatgtcgagagatcagaatcagagaacagtgatcaacattttccgtatgtttatggcacagatcggctcgctgatcatcaatgcgtgtacactgccatttatcaatgcacttggcggaagcggaagccagaagagctggataattgtatcggtaatttatggtgtgatcgcagcagccttatttttaacttgttttgcgaagacaaaagagcgggtgcaggtatctatggagcagaaagaagatattcgtctggaggaatcttttaaactaatcatgaaaaataattactggctactcattgtcggaatctgggtaagtatggcatttggcatgtcactgaatatgagtgtcggaacgtactatgcaaaatacgttctgggaaatgaaaatgtagcagggtttctttcggcactctcaattcttccggtgattgtatttatgccggcaatcgttccgctcagtaaaaagtatggtaagagaaatgtggcatttgtgggaagttttatttacatggcgggtcaggtactgatgctggttagtccggaaagcgcagcatggctgttgatttgctctctgattaaaggagttggaaatgcagcaatcgtcggaacattatttgccatggttgcggatacgattgagtacggtcagtggaagaccggaaaacgtgtcgaaggaatgctgtattccagcacaacatttggggcaaaagtaggtatgggaatcggaggggcagtagctcttggtattatcggtgcagcaggatatgacggacttgcagcagtacagacggaggcggccatctacgcgatcaaacaagtatatctggttctgccgatcccatttttagttttgatcccgatcttctatggattctataagctggataaaatctatccgaaagtgatggaagatctggaagaaagagaaggtaagcaataataaaaatttaaaaatagttttagttgaaagaaattttaagcaggagatgaagagaaatgacaaagcaatttaattatgatgatgtaccagtattagagacaacaagtggaaaactgaaagggtatttctacgaggaagaatacattttcaaagggattccatatgcaaaagcagcgcgttttcaaatgccgcagaaagtgacctgggagggcgtaaaagacgcttcctcctacggatttgtatgtccgcttctgcaggctgacacgccaagcgcagaactgatggttccgcaccgttactggccgcagaacgagaattgccagaatctgaacatctggaccaaaacactggaagaaggggcgaaagcgccggtgatcgtatggcttcacggcggcggatactttgcgggatcttcgattgagcaggtttcctatgacggatttaatatgtgtaagaacggagatgtcgtagtcgtatcgattaatcaccgcctcaatattctgggatacttagatttatcaccgtttggagaaaaatataagaattcaggaaatgcaggtcatgccgatatggtggcagcgcttcagtgggtgcatgacaacattcatttatttggcggagatccggagaatgtgacgatattcggacagtccggcggtgggatgaaagtggctgacctgatgcagatcgaggcggcagatggattattccatagagccatgatcatgagtggcgtgggaagcgcatcgctgatgccatcgtgtaccggaaatgggtgtgcgattgtcactgcgctgttaaaagaacttggaatcacagaaagtgaagtatctgcggaagatgtggagaagctggagagtattccatattatgcacttgcagatgcctatacaaaagtaagtccgatggttgcaatgcagggagaatacatcggaggagctccgatggtaaatgaatattttaaaggaaatccgctggactacggattccgggagcatgcatttgacattccggtcatggtcggaagcgtatttggagagtttgcatttatgccggcagagtatgataaaaatgcactgatggaggaacagacaaaacagatcatcagcgctgtttatggagagaacacagaagagatgattgaggcgtttcagaaagcatatcccggaaaacatccgacagatttgctttttatagatcgtgtgatgcgccagccatccaaagcgattgcgaagctacatgcatcaggaaagaaggcggggacatatctgtatgactttacattggaattcccgatccatcacaataagatcgcatggcactgttcagatattccattcttctttcataatacagagttagtggaggtatgtcagatctcggagatagcagagcggctggaagcgcagatatttgaagcattcatggctttctcaagaaccggaagaccggagagtgacaaacttccggagtgggaggctgtgacagaagaaaaagaacctacaatgatctttgacagagaatgtgaagtacgttacaattttgatgatgagttatatcagaaaatcgatgagatcctgccaccgtttaacctgatgcagatgatggcacaaggtgcggaaatacaacattaagtggaggctgtgtgcgatgcagttcaatcggaataaagtttggtgtatttttttgtagcttaacaaacggtgtttgggagaaattacacgatcaaaaaagagaaaaggaatcagaattttatggaacagaaatggacagagaaaaaggaagacggatatagactgctccaaaatgaaaacggaccagagttgggaatcagtgaaggaagcagagtcaaaatcttggtcgtagatggatatgcatttaaagatctggcaggagccggagagttacttccgtatgaagattggcgtttatcttatgagaagcgtgcaaaggatctggcagagcgtttggaaatagaagatattgcagggctaatgctttacagtgcacatcagctgattccagcgaaaggaaaactagcggagacatttggtggaacttatgaaggaaaacgatatgaggaaagtggtgcaaagccatgggaattgacagaccagcagaaggagtttgtgcagaaagataaagtgcgccatgttctaatcatggggcttgagagcacagaggcggcggtcagatggaacaataaccttcaggcattggcggaaaataccggtttcggaatcccagtcaataacagttcggatccgagacacagtgcgggttctacggcagaatatatgggggtgaccggagaaccgatctcgaagtgggcaaatggcattggattgtccgcatccttcgacccagcgctggtaaaggcatttggggaagctggatcggcagaataccgggcacttgggattacgacagcactttcacctcagattgatcttgcgacagagccgagatggatgcggtttgcagatacgttcggggagcacacccagatgacgatcgatatgacaaaagcatactgtgacgggtttcagacaaccgaaggaactgcggacggatggggaaaggacagcgtcaatacaatggtaaaacacttcccgggcggaggcccttgtgagggaggaagagatgcgcattatgcctatggaaaatatgcagtctatccgggagaaaattttgcagagcatttacggccatttacagaaggagcattttcgcttggaggaaagacaaaaaaagcaagcgctgtcatgccttactacacgatttcttatgagagagatcagaaatacggagagaatgtaggaaattctttcaacaaatatctgatccaggatttgctgcgggaagagctgggatatgacggagtggtatgtaccgattggggaatcactcatgataccggaaagacggaagaagagtttgctggaaaatgctggggtgtggagcagctgacagaggcggaacgccatttaaaagcattggaggctggtgtcgaccagtttggtggaaataatgatgtcaagcctgtcatggaagcctacggaatggcatgtgaaaagtatgggaaaaaggctacagatgcaaggtttcggagatctgcctaccgcttgcttttaaatattttccggacaggactttttgaaaatccatatttaaatttggcgtcttctttgagtattgtaggatgtgaaacgttcaaagaaaaaggatttgagtcgcagctgagatctgtgacgatggtaaagaatagggagcatgtacttccattgaaaaagggaatcaaagtttacattccaaagagacatatacgctcttatctgaactttatgagtatgccgacaggagatcagacagtgattccgatggcaaaacaagcggcagcatcttatttccatataacagaagatccgagggaagcggatgccgcgctctgttttatcgaatccccgatcagtgttggatatgatccgaaagacagagaagatggtggaaacgggtacgttccggtgacacttcaatatcgtccatatgaggcaaaaactgcaagagagataagtattgcaggaggggatccgctcgaagcatccaaggaccgtgggtataaagggaagtggaacacggcggcaaatgaggaagatcttgatctgattctgaatatgagaaaagagatgggagaaaaaccagtcattgcgatcgtcaccttaaaaaatccgatggtgatggcagaatttgaaccgtatacggatgcaattctcgtagaatatggagtgactccggcagctgtgctagatgttcttaccggatcatttgatcccgaaggactactgccaatccagattccaaaggatatggaaacggttgaacaacagaaagaagatgtggcatttgacatggaatgctacgaagacagtgaaggacatacttacgattttggatatggaatgaattttggcggggtcatccgggatgaaagaaccaaaaagtacgtaaaatagaaaaaataaaaatattgaatggatttttgcctgacagtcgtattataagtgaaacgtaattattacatttatagtatgggaggacttcgttatgagtataaagaaaacaacagttggtattttgacttcaataatcgtagtttccgcagggacagcgagtgtctttgctgctggacaggcaaaaggaagaaattttacagatgtcgatggcaatggaatctgtgacaatgcaaaagtggtctgttcctatgtggatgaggatcaaaatggaatctgtgatcattgtaaatctggccaagagaaagcgcaggcagacggaaagggaatgagacagggaaaaggatgtcgggcaagacaaaataagtagcaggtgaaaaactcatgaaaggagagcaagatgtaaatcgagtagtcgagcaatattcggatatgattcggcgactttgcatgatacatttaaaaaattatgcagataccgaggacatatttcaaacggtgtttttgaagtatgtccttagttctgtttcatttgaaaatgaagaacacgagaaggcatggttcattcgtgttacgatcaatgcctgtaaagattttctaaaaagctttttccgcagtcgcgtcatatcgttagatgacattctggatcagccggcggaaattcgggaagaccacagggaagttttggaggcggtgctgtcacttcctcagaagtatcgggatgtggtatatctacattattacgagggatatactgcttctgaaattggggatatcctcaataaaaaggtaaacacggtttatacacttttgacgcgttcgaaacaaatgcttcgggaaaaactggaaggtgatgaatgatgagtatgaatgagcaattgaaagaagcttttggtcagatacgggcagaggatcagctgaaaaagaaaacaaaagagtttctttctcaaaaaacaagtagtggcagcagaaaacaaaagataaattaccggcaggttgttccggtttgtttgtgcatacttttttttgtatttggaggacattggctctattttgaaccgacagcagaaatcagcatcgatatcaatccgtctgtggagttggaacttaatcgatttaatcgtgtgatctcagtggaaagttacaatcgggatggcgaagaattgttggaatctcttgatgtaaagtttctgaattattccgaagcagtagaacggattatgaaacaggagaaaatcgtattgctgctggaatcagatgaaattatgactgtctcggttgtcggggatgatcaaatacaatcaaaagaaattttgaatcatataaagggctgtacaaataaaagcgaaaatatttattgctattatgtaaaatctgaagaagtagagaatgcgcacgaagcaggactttcctgtgggaaatataagatgtttttagaaattcaggagttggatccgagaattacggcaaaagaagtgaagaatatgtcgatgaaggaactgagaaacttgctgaaagagctgtcaggaacagatcaagagaagccagagcctcacgaaaaaagaaaaaggcatggaaggtgtaagtaaaaaaagtgaagaaaaatttaaaaatgtattgacaaatccgaaaacttagtataaaataacttttgttgttagcacaatactgagttgcccagatagctcagtcggtagagcagaggactgaaaatcctcgtgtcgctggttcgattccggctctgggcactgtgcgggtgtagttcaatggtagaacaccagccttccaagctggatacgtgggttcgattcccatcacccgctttggtgaaagccaaagcagtatcacaattttatagcagatgcgggtgtagttcaatggtagaacactagccttccaagctagatacgtgggttcgattcccatcacccgctttggagaaacatgtacagttggtacatgtttttttctttgtcagtggaaatgttgtcttagcaaaaggaaaagggattgccgataaaaattatcattattatcgaaaatcccttttctttttatttgctttttctgttgttgggtcatgagacgctttaagagtattttgtctcaacattcctgcacttgaagtggaagatcataaatccgagtacgagcattcccccgattacggctacaccgactttggagttgtcggcaagctgggttgtgattcccatcaacattgtgccgaggaaggatgcacctttaccgaaaatatcatagattccaaagtattcgctcgatttgttcttcggaatgattcgggcaaaatgagatctggagagtgcctgaattgccccttggaagactgctacgagtacagcaaggaaccagaattcccatgttttatccagctgcagggcgaaggcagcgattccgatataacctacgatcgatatagagatcagatctgtcgtgcgatattttttcgtcagttttccgaacaggatcgaaaatggaaaggcaacaatctgcgtaaggagtaaagccagaagcaggctgctgtcgtcaattcctacatcttttccgtaagaggttgccatctcaatgatcgtatacactccatcaatatagaagaaaaaggcgagaaggaaataaaagacggttttattctcgcgcaattctttgaagatatttccgaagcgctgaaagctgctcttgatcggggagcgtacaggttcaatatagtagatctgtttataattttttaaaagtggcagcgtcacgaccagccaccatacagcatttaagaggaatgcaattgcagttgccgcagcagtcgacagtccgatcggctctgcgaacagcacaaggataaggcttgcgataaatggaacacagcttccgagatagccccatgcatagccgagagaggagaggttatccatccggtcatcagtagtgacatctgataacatcgcatcgtaaaaaatgagactggaagcaaatccaactttggcaactacgaaaacagccagaaagaagatccaggaggacggcagagcaagagcagcacagccaatgacaccgaccatcatggagaaggtaaaaagtggtttcttgtagccttttgtatctgcgatcgtgccgagtacaggacctatgactgcgacgatcagtgtcgaaagagacacagcgtatccgtagtaggcggtggagtccgaaagggaaattccgttggcagatgcaatgtttttgaaatagattgggatgatcgttgataccagaaggacaaatgcagaatttccgatatcatagaggatccagtatttttccagttttgtcagttgattcttgtccataggggactctcctttgttaaatcgttattcaaagtttctgtcaaaccgctcttccagcggctctccggtagaaagtgcattgtaaaagctttcggtcaggcgtacacctaccggaattgcctcgatatacaggtggctgagtctgcggcagatcggtgcgcaatccggattgcgatgaaagttcatcacaagaccatgaagttcctcataacttccactgagccgaaaggcagcattgatcactgcgcggcgcactttgcaagggctgatcagaaagttgttataaaagcggaatgattttaatgcttcgaacatttctttctcagaaattgcagggaaaaactgtgcaatgcagttagaaatttctttgcttacctggatgtgagaaagtgtctttgttgtgatgggatctttctgacagtggagaagaatactccggtcaaactcagtctcaatttccgtatgagagattccggtttctgtcatctctccgatatatccgtggcattcgctgtcgagagagtagtggcagataaatccgagaatataagcaatggatgcctctctgtcattactccggttgatgacacgtcttgcctgtcggaagaaaggagcagcaatttctgcgtgcatcaagtgcccggctttgctgactggattgctctttagcggtctgtaaaagaataaaatgtcaggaccgtggagtccgatgtcaaaaagtgcacggtgttctgtgatgatacgccgaatatccggattttctatatttgcaaggactttttttccaaatgtgtagtgtgcataagctgcaggcatggcgattcctcctttgaaattacaatgataaagtgtaagtattgtatgttaagtttgtcgtatgtattgtgttaaaaacttgtaaaacagctgcttgctattttgtcagcacttcgattccagtctctgtgacgagcaccatatattcaatctgtgcagaaagtccatcgtcaatcgtgtagaccgtccagtcattatcctcatcgacgaagaaatcagggctaccttcattgagcatcggttcgatcgtaaacatcatacccggaacaaggaccatctcagatccctttggggttacataggaaacaaagggttcttcgtggaactccagtccgattccatgtccgccgatatcttctacgacagaatacccgtttttctgtgcgtgtgtgtagattgcatcggcaatatctccgaggtgtccccaaggttttgccgcttttaagccaagttctacacattcttcagttacgcgcacgatccgctcggcccgttcgctgacggttccgattttaaacattctggacgcatctgaaaagtaaccgtcaaggattgtagagacgtcgacattgatgatatctccttcctgaaggatgatatttttatccgggattccgtgacagatttcgttgttcagagaagtgcatacacttttcgggaatccttcatagccaagcggagccggaatgccaccgtgggaaacggtgaaatcgtgtacgagtacatcgatgtcctctgtgctcatgcctgcgtggatgtgtttggcaacgtggtcaagcacagcggtgtttaattcggcactttttttgattgcttcaatctgagcgggtgtctttaacagttctcttcccgggacaatgtgtccggcttccctcagttgctccattttttcttccatcgccatatggcagcgtttatactttttgccactgccgcaccagcataattcatttctttccatgatgtaagactcctttttataaaataatgtacattgtcaggcaaagaaaaaaggggaaaatacagtcttttcctttctgccttgcaatggtttaaaatagtaacagatgatttgtacttcatatagtataccgcatttttttgttgttagcacctgaaaaataagatatactatatttgttgagaaatagtgactgtgaatcggaagggatgggaaatatttccatagaaaggaagggcttgtatgttaagaataggaatgttgacaagcggtggcgattgccaggcactgaacgcggcgatgcgtggtgtggtaaagggtatttgttcaaagatcaaggacgtggagatttatggcttcaaagaaggctataaaggattgatctatgctaattttgagatgttgactccgaaagatttttcggggatcctcacgatgggtggaacgatccttgggacatcgagacagccatttaaactcatgcgggttccggatgagaagggactggataaagtggaagcgatgaagcacacttaccataagctgaacttgaattgccttgtgatccttggaggaaacgggacgcataagacggcgaatcttctgagggaggaagggctgaatatcattacacttccaaagacgatcgataatgatctgtggggaacggatatgacgttcggattccagagtgcggtagacattgcgacaaataccatcgactgtattcatacaactgctacatcccacagcagaatcttcattgtcgaggtgatgggtcacaaagttggctgggtgacgcttcatgcaggaattgcaggaggagcggatattatcctgattccggagatcccatatgatattgaggttgtggcagaagcaatccggagaaggacagaggcaggaaagcattttacaatccttgcggtagcagaaggtgccatctccaaaaaggatgcaaagctttctaagaaggaatacaaagagaaattaagaaatcgaaagtatccgtccatcgcttacgaggtggcagaggaattaaaagaacgtacgggtcaggaaatccggattacagtgccgggacatacgcagaggggaggctctccttgcccatatgacagagtgcttgcgacaagactcggagcagcggcagcggaattgatcatgacagaacagtatggttatatggtcggaatccgcaacggggagacgacaaaagtgccgctgaaggaagtggcaggaaagctgaagacggtgcagccggattccggcattgtccaggaggcgaagattacaggaatcagtttcggtgataaatagcagaggttacaggaaatacaaaagggaacggtagattgttttccggaatatagaagaatgaaacaccaacaggaagataaggagagaaaaatatgtcatatacagcattgtacagaaagtttcgcccgggtggatttgaggatgtaaaggggcaggatcatatcgtacagacattgaagaatcagataaaggcagagcggatcggacatgcttatcttttctgtgggacaagaggaaccggaaagacgagtgtggcgaagatttttgcgaaggctgtaaactgtgagcatccagtagacggaagcccgtgcgggcaatgcgcgatgtgtcagaagattgcggaagggacatcgatgaatgtgatcgagatcgatgcggcatcgaacaatggtgtcgacaatatccgtgagattcgtgaggaagtcgcatatcgtccaacggaaggaaagtataaggtatatatcatcgatgaggtgcatatgctttccatcggtgcgttcaatgcactgctaaagacactggaggagccgccggagtatgtaatctttattttggctacaacagaagtacacaagatacctattacgattttgtccagatgtcaacggtatgactttaagcggatcacgatcgatacgatcgcggcgagaatgagtcagctgatggagacagagcatgtggaagtagaagagaaagcaatccgctatattgcgaaggcagcggacggttctatgcgtgatgcgctaagtctcctcgaccagtgtatcgcattctatctcggacagaaattgaagtatgatgatgtgctggaagtacttggcgcagtggacacagatattttcagcaggatgcttagacaggtcatggcgcgggatgtggcaggggttcttcagacggtagaggaactggtcatgcagggaagagaactgacacagctcgtggcagattttacatggtatttaaggaacttgcttcttgtgaaaagttctgataatatggaagatgttctggatgtttccacagagaacttaattcagttgaaggaagaggcaaagatgattgaaagtgatatgctgtttcggtatatccgtattttctcagatttgtctaatcagatcaaatacgccacacagaagagagtgcttctggaggtgacattgatcaagctctgtacaccggcaatggagacgacgcaggatagtctgctcgaccggatccgtgcagtggaagagaaggtggagaaagcagatttttcgatgcagggagagcagagagttgtctatgtgcaggaggagaagcaggcggggcctgttgagcgcccgaagcttgagaaagcaatcccggatgacgtgcgggaagtagtgcagaactttagaggaattgccaatgaggcatcgccgatgctgcgtaattatctgaagtatgcgaagctaagtctcggcggagacgaccggctgttagttgtactgccggatgagatttctgcaaatgttgtggggacagaagaacataagaaggagctggaagctctgattgaaaacagaatcggcaagacagtgacgctcgatgtccgtcaggtagacgatggaagaaggttcgaggatagttttgtggatatagaagatgtgattcatatggaaattacggtcgaagattaaggaggatatgattatggcaaaacgtggaggatttccgggcggaggaatgccggggaacatggcgaatttaatgaagcaggcgcagaagatgcagcgccagatggaagaacaggcaaaggaaatggagtcgaaagaatttacagcaacagcaggaggaggcgctgtagaagtgactgtttccggtacaagagaagtcttgaaagtgaaattacaggaagaagtggtagatcctgatgatatcgagatgttagaggatctgatcgttgctgcaacaaatgaggcgctccgtaaagtggaggcagaatcagcatcagcaatgtcaaaattgacaggcggtcttggcggaggaatgccgggacttccattttagtgtaagaaggagcggaggatatggactattacagcagtcagatcagtaaattgatcgaagagctgtcaagacttccgggaattggtgcaaagtcagccgggaggctggcttttcatattattaatatgccgaaggatcaggtggagcggctggcatctacgttggtggaggcgagaaataatgtaaggtactgcgcgcagtgctgtacattgacagacaaggaactttgcccgatctgcggaagtaataagcgagatcagaggacaatcatggtcgtggagacgaccagagatctggcggcttatgagaagacaggaaaatataatggagtctatcatgttcttcacggtgcgatttctccgatgcttgggatcggaccgggagatattaaattaaaggaactgatggaacggcttcagggggatgtcgatgaggtgatcatcgccacgaattccagcttggaaggagagacaacagcgatgtacctcagtaaactgatcaagccgaccggaattaaagtgagccgtatcgcaagcggggtaccggtaggaggagatctggagtacatcgatgaagtgacacttctgcgtgcattggaaggaagaacacagctgtaaacatgaagatgcatttgtatgagatactgcaggaggaaacagaatcaaatatgcaaggaggaaacgggtatgaaattttttattgacacagcaaaagtggaagaaatcaagaaagcaaatgacatgggtgtcatctgcggagtaactacaaacccatctttaattgcaaaggcagggcgtgcttttgaagatgtgatcgcagagattgcatcgattgtagacggaccgatcagcggggaagtaaaggccacgaccacagatgcagaaggaatgatcgaggaaggcagaaagattgcgaagatccatccgaatatggttgtgaagattccgatgacggcggaaggattaaaggcatgtaaggtgctttcgtccgaagggatcaaagtcaatgtcacattgatcttcactgcgaatcaggcgctgctggcggcgagagccggtgcagcttatgtatctccgttcctcggaaggctggatgatatctctgtgcgaggcgtggatctgatcacagaagtggcagagatctttgccgtttctggtattgacaccgagattatcgcagcgagtgtccgcaatccaatccatgttacggattgtgcgctggcaggagctgatattgcgacagtgccatatgcagtgatcgaaaaaatgatacaccatcctctgacagaccagggaattgaaaaattccaggcagattaccgggctgtgttcggggaataaacggcttgcataaagagaaagcagcagatataattgagtaggaaaacaaaatgtggaggcagtctaatgaataaattagaattaatgaaaatggcgaatgaaatccgcaagggcgctgtgacggcggtttaccatgcgaaatcaggacatccgggcggatcattatccgcagcagatatctatacatatcttttctttgaagagatgaatgttgacccggcagatccaaaaaaagcagacagagaccgctttgtcttatcgaaaggtcacacagcaccgggatattatgcgacacttgcaaacagaggattcttcccggtagaagatctgacaacacttcgtcatgtgggatcttatcttcaggggcatccggacatgaagcacattcctggtgtagatatgtcaagcggatctctcggccagggaatctcagcagcagttggaatggcgatcggagcaaagctttccggagatgattatcgtgtatacacacttcttggagacggagagatccaggaagggcaggtgtgggaagcagccatgcttgcaggacatagaaaattagataacttagttgtgatcgtagacaacaacggacttcagatcgatggaaatattgcagatgtcaattctccatacccgatcgacaagaagtttgatgcatttaacttccatgtgatcaatattgacggacataactttgacgagatcgcagcggcatttaaagaagcaaaagaagtaaaaggaaaaccgacagcgatcatcgcgaagacgatcaaaggaaaagatgtttctttcatggaaaatgaagcttcttggcatggagcagctccaaatgaagaacagtatgcagtggcaatggcagatttagagaaggtaggtgaagcattatgtcagatgtaaagagaattgcgacaagagagagctatggaaaggcattggtagaattaggaaagcttcacgaaaatctggttgtgctggatgcagaccttgcaggtgctacaaagacagcgatgtttcagaaggaatttccggagcgtcatattgactgtggaatcgcagaaggaaatatgatcggggttgcagcaggacttgctacgacaggaaaggttccgtttgcaagctcgtttgcgatgtttgcagcaggacgtgcatttgaacaggtgagaaactctgtcggatacccgaagttaaatgtgaagattggggcaacgcatgccggaatctctgtaggagaagatggagcgacacatcagtgtaacgaagatattgcgttgatgagaacgattccgggaatggttgtgatcaacccttcagatgatgtagaggcaaaagcggcagtgaaagcagcgtatgaacatgaggggccggtatatcttcgctttggaagacttgcagttccggtgatcaacgataatccagaatacaagtttgaacttggaaaaggaattgtattgcgtgaaggaacagatgtgacaatcatcgcaaccgggttggaagtatctgaatcgttggaagctgcaaagaaattagaagcagacggaatcagtgcaaaagtaatcaatattcatacgatcaaaccgttggatgagaaattagtgatcggatctgcaaaagaaacagggaaggttgttacagtagaagaacattctgtgattggtggacttggaagtgctgtatgtgacgtgctgtcagaaaattatccggtgaaagtgctgaagatcggagtgaatgatgtgtttggagaatccggaccggcattagaactgatcaagaaatatgaactggatgcggacagcatttacaaaaaagtaaaagcatttgtatcataagagcagagactatgatcagaaagagtaatcgatataaaagttggaagcggaaagtcctccatgtgcgtaaggagtggcaggatgagttttgtgagagcatccgagacatcgcgacacatccggtagtacttcgcatgaaattgtatccccatcacggtaacagcaactgctacgaacattgtctgcatgttgcgtattataattatcagtggtgtaagtttcttggtttggatgcaagatctgcagcgagaggagcaatgcttcatgacttgtttttgtatgactggcacacacacagaaaaaagacgggtgatcggtttcacggattgacacacccgaggacagcattgaaaaatgcaagtaagttttttgatctcaatgaaattgagaaggatattatttatcggcatatgtggcctgtgacatttttcagagtgccacggacagcggaaggtttcattaccactttgacagataaatattgtggagcgtgtgagacgagtcagagaaagcctaagcaacgaaaacaggtaatgctcggatcatatcaataaaagtaaagcagaaaaagaacgcggaagggaaagtacaatgtttgtacgattccttccgctttttgtcgaaatattccagcaacctctcgacaacaagtgataaattcagtcggctttgtgtgctatgctaaagaaaatacgcagagaggtgagtaaagatggaaagagagattcctagaaatgtaagacagattgggaacatatccggcggtcctaaaatctatgtagaagattatgtagatacatttttcgggcaaatttcggatcagacagaggaaattcggggagcatttttaataggagagatggaagacaaggagcatccggattacatatacatcacaggagcgatccagatgtatgaactgaaacgggacggaaatacatttcagattacggaagaaacatggaaaaatgcatacgaagactgcaagcgttattttggaaatgcaacgatcgtaggatggtttgtaagtgccccgggaattccggctgagatcaatgacgaggtgatacggacacacgagaatgcttttccaaatacgtattctatatttgttatgcgggatttgcgggagaaagaagattatttttatgtgaataaattcaatgatctgatgaaggtgagtggatattatatttactatgagaaaaatcctgcgatgcagaattatatgatcgcatcgcgcagaaaaaatggacttacgatcagtgagtcggtggaggacagggccgcaaaaagttttcgcaacctgattcgtacgaagggggagttagaagatcaaaaacagtcaattcattttatgcgtatcgccagttcgtttttgatcttagtcatgctggtgatggggataacgatgataaataattatgacaagattcagtcggtacaaaaatcgctggaagcactcacagaatctgcacaatcggaacaggaagcaaaaagagtcagcgtagatcggacaccttccgttggattaaaaaaggagctggaagagaatgcagtagagaaaaaagaaatcaacaaagaagatgctgcggcaaaaagtggagaaaagaccacagaagaaaaaataaaacaggaagcatctgactggaaagaaggcgctgcggaggaacttgaggagggaagccagggagatatttatgttgtgcggaaaggggacacgcttttgtctatcagcagaaaagtttacggtacggatgaaaatattgcctctatctgtaagatcaatggtttgaaagaaaatgactttatctatgtaggacaaaaactgcttcttccgtaatcagaaaaagaaaattaaaaacacaccagaaagaaaaagtgtgatataatgtacgcgaatataagtaaaacagcgggataacgattagatcccgaaaaaacaaaggggaaaactatgactgataaaatcaataaagaattacatttgtcagagtcgatgcaaaatctgaaagaaaagatcagaaagcataaattaatgaggtggaaaagaattattacggcagcatttctgggatttatgatcatttttggatcttatctgcttttggagtaccgcacatatgaaaatacacgagtgattcgtacatacaaaggagacagttcggcagatggaagctataagatgttcggggattccgttttaaaatatacaaaagacggaatgacactgattgatcaaaaaggaaaagaaatatggaatcactcttatcagatcaagaatccgatcattgagatcaatcatgaggttgcagcaatcggagacagtggtggaaacagtatcattgtaatcgaccatgaagggatcaaaggagagattgagacgacacagccaatcgaaaagttgtctatttccacgaatggaattgtggcagcagtgttaaaagatgaagtttctccgaaggtgatgtgttatgattcgacgggaaatattctcgtagaaaataaagtatcagcagcaaaagacggttatccagtggaaatcgcactttccaatgatgggacaaccttgatcgtgtcctatttacatgtacaaagcggagcgcttgcttccaacgtggtgtattacaactttggggatgcgggaagagaagagaaaaataatcaggttgccggagaaagctatacgggtcagatcgttccaagtgctttttttatggatgatgagacgtctgtgctggtcggggagtctgggttttatatttatgagggaacagacaagcctaaattgaaaaaagaagtaaaatttgatacagagatcaagagtgtatatcatacagagaagtatatcggttttgttttaaaggcaaaggacaaaaagggatatgaaatctgtctttataatcaaaaaggacagcggacgatgtctaaaaagtttcaaggggattatgcacatgtaaagatggtcggagaaacggtgatgatgtatgacggtgtaaattgctgtatttacactgcgaatggtgtgaagcggtttgccggacaatttcaagataagattctcgatatagttccggtggggggaatcaacacttatacggtcatgaatatcaacggaatccagaaagttcgtctggtaaaatagaaggggaaaagagaaatggatcagacaaactggatggcagtcattgttatggcaatttttgtgatcagtatctgcaatggctatcgaaaagggtttttcaggctttgtgtttcttttgttgcgacaatttttacggtgatactggtgagtatccttacgccacatgtcggggaagcaatcatgaagtggacgtctgtgaatgaggtgatcgagaaaaattgcatggagatttttgcaccggcggagattgcagaaaaggaagaggtttcccttcaagagcagattcagacgatcgaacaggcagaacttccagaatttttcaagcagatccttttggaaaacaataaccgggaaatttatgggatactcggagcggaacgatttgcagattatatcagcagttatattacgaggactgtgatcaatgtaatcgcttttttgacgacatttgttttccttacaatcgtagtgaggatgactttgtttacattggatgtgatcacaaagattccgatcctgcatggattgaaccgatgggcaggagcggcacttggtttttttctaggagtcatttttgtgtggatgttctttttggtgcttactttgtttggaggtactccgttgggagcggagtgtttccgacagatacagtcaagtagattcctgtcagaattatacagagcgaatgtgattttaagagaaatgctgctttaagcaagaaggacttcgataacagaaatagaaaacatatttaaaaagaggaagagatgagatgggatatagtcatgagattattttgccaaatgaggatttgagttttaaaatgtttctatttgaagggaaaaatggaaactatgtcagaggaaaacattggcatcgctcaatagagatttttgcaatttttgaaggtagtttacgcttctttttgaatgaagaagagtataaaatgaatgcgggggaattccttttagtaaactccaacgaagtacattcgattttttctccaaagccgaatgtaacagttgtgattcagattccacttgtcgtttttaaaaaatactatacaaatgaacaatttatttctttttcgcatgagccgcgcgtccgcaatcaggaattgatgaagctgatgcataaaatgtatgatacctatgtgaaaaaagaatgcggatatgaatttcgagtacaaagctatttttatgaattgctttacacactcgttacagaatatagagatacggatattagtcccgaagcggttaaaagttatcagaaattaagtcggcttacggaaattacagattatattaaaaagaattatcaaaaagaattgtcgctggagagtctggcggaaatcttcggatattctccaacgtatttgtcgaagatgtttcaaaagtatgcaaagattaattatagggattacgtacaaaatgtgagattggagcgtgccagtaaggaattaatggagacggatcacatgattagcgatattgcattgaatcatgggtttgccaatagcaaagcctttgcaaatgcatttcgtaaaaagtatggaagattgccaagtgattttagaaaagagaaaaactaaaagaagtgtatgcagagacagctgcttccgaatgaaatcggaaagaagtgtttcgcatacactttttatgttgcaaggcataaagagggaattgtgaaaaaatgacaagaaagtgacattgaaaaggcaatatattggttgaatagaataaaaaaacttgttaaaatataaaaaaatttccaaaagaggggggagaagcttaaaaatgaaaaaggtaacggatgaatcctttaaaaaatacgggaaagtgataagcaatttagatttctcggatctgttagaaaaaatgaatgctacacaagttccggaggatgttatttatgtaccatcaatggaatgcttggaaaaatcggatgtagcgcagaaattgaaaaatagtatatacggcggcttagatattcagataggatattgcaacggacataataagtcattgaatgcactggaatatcaccgttgctcagaagtggatgtggcggtggatgatctgattctgttgcttggctgtcagcaggatatagaggacgactttacatatgacacggaacgggtagaagctttttatgtaccggcaggaactgcggtagaattatatgcaacgacgcttcactatgcaccgtgtaacgtggaagatgagggatttcgttgtgtgatcgtacttccaaaggatacgaacacagagcttacgtttgaaacatccgatgagggtgaagaaaaattgatggtcgcaaaaaacaaatggttaatcgctcacgaagatgcaaagattgaaggagcttttaatggactcaaaggtctgaatattacgttggagtaaatcaggaggagaaaaaatgaataatatgccaaaacttaagattggtgtggtagcagtaagccgggattgttttccggaaagtttatctgttacaagacgagaagcacttatcaaagcttacgttgaaaaatatggagaagcagaaatctatgaatgcccgatttgcatcgtggaaagtgaaattcacatggttcaggctttagaggatgtcaaaaaagcaggatgtaatgcattggttgtataccttggaaactttggaccggaaatttctgaaactttacttgcaaagcattttgacggaccaaaaatgtttgttgcagctgcagaagaaagaggagacaatttgatccagggacgtggtgatgcatattgtggaatgttgaatgcaagctacaatctgaagcttcgcaatgtcaaagtatatattccagaatatccggtgggaaccgcagaagaatgtgcagatatgatccatgaatttgctccgatcgcaaaagccattatcggactgcatagtttaaagattatcagctttggtccgcgtccgttaaactttttagcttgtaatgccccgattcagcagctttacaatttaggggttgagattgaagaaaactctgagttggatctcttcgaagcatttaataaacatgcagatgacgagagaattccggaaattgtaaaagaaatggaagaggaacttggtgcaggaaataaaaaaccagagattcttagaaaattagcacagtatgagctgacgttaaaagattgggtagaggagcatagagggtacagagaatatgttgccattgcaggaaaatgctggcctgcattccagactcagttcggatttgttccgtgctatgtgaacagccgtcttacagcgcagggaattccggtatcttgcgaggtagatatttacggagccttgagtgagtttatcggtacagtagtaagtaatgacatcgtaaccttactggatatcaataacaatgttccggcagatctctatcgggaggatattgaaggaaaatttgattatacacataaagacacatttatgggattccactgtggaaacactgcaagcaaaaaactttctttctgcgagatgaaatatcagctgatcatggcaagatcgcttccagaagaagtgacacagggaactttggaaggagatattgttccgggcgatatcacattcttcagactccaaagtacagcagattgtaagctgcgtgcatacattgcacagggagaagttcttccagttgctacaagatcattcggttcgatcggtatttttgcgattccggagatgggaagattctatcgtcatgtgttgattgagaaaaacttcccgcatcacggagcagttgcgtttggaaaacatggaaaagtattatttgaagtattcaaatatattggagttccagtagaagaaatcggatacaatcagccaaaaggtgtgagatatcctacggaaaatccatggggataaataagtgaatcgataagttgcctatactttttgcgtatgggcaatttttttatgttcgtaggagattgctttggaatcctatatgataaaacatgcttgcgagagagggtttgttctttggatattccaagaaatatatgtgtgaatatgatattttattgacaatctcgttgatgtgcataaaaaagtagatatacaaatgtattttatatgcaaaatgacaagaaagtgacattgagaggttgaaagtctgctagtgatgcacaaaaaagattgctataatttaaaatataagaaacaggaaatccacaaaaggaggaaacaaaaatgaaaaagagacttgcgagaattcttgctgcaaccttagcagcatcgacagtacttacaggttgcgggggtggaagtgagaaaaaatctgcgaatgggaaagcacctgagaaacagaagattactgaggatgtaacaaagacagaaggagaaatcaacgtttggacaaacttaagccaggacgagatgaatttctatgtggaggagttcaataaaattgtaccgggcgtcaaggtaaatgtaacggttatgccgtccaaagaataccgaacaaaacttcaaaatgcgttccgtacaggaacaaatgcaccggatgtagcaacttttgaaatttcagactttggtgtttataaagattccgatatgcttgagaacttaagccaggaacagtacggagcagatgcgatttcgaaagacatgatcccatatgtagatgagttatcaagagatggggaaggaaatgtaaaaggtctttcatggcagtcaacaccgggcggattctggtacaaaaaagcattagcaaaagaatatcttggaaccgatgatccacaggaattatatgatatgttatcaagctgggataaaattgttgaaacgggtaaacaggtttatgaaaaatcaggtggaaaaattgctttattagatgacgtggaatctgtattacagctctatgcatcttacaaaggacaggcatgggtagatgaaaacaaccacatcattgatgatgagtatatgcttgagatgtacgaaatgatggatactgttgtaaaaaataaagtagatgcagaagctgatatgtggtcagcaggctggacatctggaatgtattcaaaagatatgtttattttaacatgtcttccaacttggggattaaacttctgtattaaaccaggtattccggcagacgaaatggacaaagctgctaatacatggggatatatgcaggctccaattccttaccagaatggtggaacatggtatggaatgtattcgaaatcagaaaataaagatgctgcatgggcttggattaaaactatgacatccaatgaagattaccttgtaaacggtcttgcaaatacatggggagatttcccaggatatatcccggcaattgaaagatgtattgaagagggacatacagatatcgttacaggagatcagcagtattttgcagatttctatgaaacagcaaaaaatgtaaaaggagatccgatgacaaaatatgaccgtcaggcatgggcaagtgcaactgcacagatggatctgatagctacaggacagacaacaccggaagaagcagtagaaggctttaaagaagaaatgaaaaatatttatccggaaatcgaaatcgattaatttttagcaacatagctgcttcgtggaggtattcgggaagagtacaacgcgaagcagctttttttagtcggaaggaggattacaaaaaagtgtccgcaaaaacaaagaaaaaacgaaataaaataaataaaaataatgcaggatatttctttattgccccatatattattgtgttcctggggtttacgctgtatccgattctttatacgtttaaattaagctttatgacatgggatggatttggagaacaacaatttgttggattagccaattatgccagattgttacatgatccgatgtttatcaagtcgatcgggaatacaatattcattgcgctgctttcgatgataccacagatggtattcggattagtgcttgcatttttattgaatcagagaagattaaaaggatctaatttctttaaaacggttttctattttccgaatcttgtcacagcagtttcgctcggtgttttattcagcttactctttgactggaaagtcggaagcgtgaaccagttacttacctctttgcatattatttcggaaccgatcaactggaaaggaagtccgatcttatcacagttgattgttgcatttgttctgttttggcagtattttggatactatacgattatcttcacagcaggaattcgtggtatttcttatgaactgtttgaggcagcagaggtggatggggcaacaaaggttcaaaccttctttaaaattgttcttccgcttatgcgaccgatcatgaccttcgcatttgtaacttccatcataggtggtctgcaaatatttgaccttccatatacattcggcggtcaaatgggaggaacgaaaggatccttgttgacgatggttatgtatatgtacaatattgcatttacaaatttagattatggatacggtgcagctatttcttatggattatttgtgattattattgtattttctattatctttatgaagtatacaacaggaaagaaggagcagtattaaatgagtgtgaaagcaaaaaaagaaaaccacgcaaaaatcggcaggattttgacctatatcgttttgatttttctggctattataagtatagtaccattttataatatgattattggatgtactcatgataatgcagccttagccacatcttttcaaatgcttccaggaagccatttgatggataattataaacgattacaagacaatgtaaatatctggagaggacttgcgaacagtatttttatttcggttacttatacattgatctctacatatattggagctttaacggcatatggatttgcaaaatataaattccgcggaaacaaagttttgttctggattgtacttgcaacgatgatgctgccaggacagcttggtatcatcggatatttccaggagatgaatggattaggattgctggatagttatctttctattattatgccgagttttgcaactccggttatggtatattggatccgtcagtatatagatgcgtatgttccgaatgagcttatggaaagtgcgagaattgatggctgcaatgaatttaaaattttcaataaaattattttcccggtaattattccgggtgtagctacacaggcaatttttacatttgtaggatgttggaactcatttgttcagccgtctattcttttgttctcgcaggagaaatttacacttcctattttggtacagcagatgcaaggggtatacaagacggactatggtgttatatatttaggagtaacactatcagttattccaattcttcttttatttatgttctgttcaaagaagattttggaaagttcaatggctggtgcagtaaagggataatctatgaaatatgattttgatgaacaaatagacagaagaaatacaaacagcgcgaaatttgatgagatggatgcgctgtttggatcagacgtgatgcatttgggagtggcagatatggactaccgctccccaaagccaatcatagaggcgatgcagaacattgttgagaaaggtgtgtttggatatactatttggccagagaattatgaagaactggtttctcaatggatgaagcgtcgttatggacaagaaactaagaacgaatgggttgtattttctccgagaattaatatggcgttgaatatggcagtggaaacttttacaaatgagggagatgggattgttcttcatactccggcttacacagcgctccaaaatgcagttgagaaatatcatcgtgttatgattgaaagtcctcttgtgttggagaacggtagatataaaatggattttcagcagttgagaagaaatctggacgagaagaaagcgcaaggtgtctgtgcaaaaatcatgcttttatgtaatccacataatccaacggggagagtctgggaaatcgaggagctgcagcaagtagttgatatttgtaaggaatatgatctgcttttgatatcggatgaaatacatgaagactttgtgaaaaaagggcataaatttgtgtcgtgcctgcactttcaagaggatcttcagggacggatgattgtgtgcaattcgattacaaagacatttaacgtaccgggagttatcttgtcgaacttattgattccggatcaaggaatcagggagcggatgaaagaaactatggatcgttggggacttcataatccgaatatttttgctgccggtattatggaagcggcttatacgcaatgtgatgaatggatagaacaggtcaatacatatctggatgaaaattatgagtttttgaaaaaatatcttgaaaagaatatgccggaactggaagtgatcccatcagagggtacttatatggcatgggtgcaaacagaaaagcttcagatcagtccggaggagttagaaaagttttttatcgaagatgcaaaggtatctgtttatatgggcagcagatatgggaagcatactgattcttttataaggatcaatattgcaacgtcaaggagttatctacaggaagcattagaaaggattcgggcacagtattacaaaatagcgccaaacaataaaaagtaaaagcaattagaggtgtagaagatggatagggaatttttggataaactattagagcagatatcggtatctggctgtgaggagtgtggacaagaggtagtaaaatctcacatgcagcccttttcagatgagatatggacagatgaaatgggagatgtaatctgtattttaaatccggaaagtccggttagagtcatgctgtctgcacatgcagatgaaattggtcttcttgtcacgaggattacagaggaaggcagaattcaggcgattgagcgtggaggtatcattcatcagaattatccgggacagaaagttcggattcatacgcaaaaggggattgtgtatggtgttgtagagtgcagcagggaattgtttaaacaagagaatttaaaagcttctgattttttgattgacatcggtgctacttcgaaaaaagatgcggaagaatatgtatcgcttggagatacggttgtattggatgcaggagtaagggaacttgcaaatggcagacttgcagcgcgggcattcgatgatcgaattggtgtttttgtaattatggaggcattaaaaagagcgagggagagaggctgtgagataggagtttatgctgcagcgacggttggcgaagagacggttaaaaacggggcatattggtctagtacacggattcagccgacagcagccgtcgttgtagacgttacgaattgtacggattatagcaggttcccaaatccggcagtagcgggagatgttgttcttggagggggaccatctctttgcaatagtccgttagcatccaaacggttgaataaaaaaatgcaggaatgtgcagaacgcatcggcattcatacacagcgtgaggcggcaagtgcaagaagctatacggatgcagatgagattcatttttccaatcaaggggtaccggtagtatttacagcagttccactgcggaacatgcatacaccgggagaaattgcggatatgaaagatgtagaaggctgtattgaagtgattgcagaatttttatgttcgtttactgagccgtaatgaatgtgtggtaagttaacaggaaggtagttggaggaaataaatatgttatacataggtatcgatttagggacatcggctgtgaagctgcttctgatggatggaaacggagaaattaaaaaaatagtttcgaaagaatatcctttgtttttcccgcaccctggatggtcagaacaaaatccggaagattggttcgaacaatctatgaacggcctgaaagagctgactgcagaatgtgataaatcgcaaattgcaggaatcagttttggtggacagatgcatggattggttgtcctggatgaagaagataatgtaataagaccggcgattttgtggaatgatggtcgtacgggagaagaaacagagtatttaaatacagtagtcggaaaagaaacactttcgaagtatactgccaatattgcgtttgccggttttacggctccaaagattctttggatgaaacgtcatgaaccggaacgttttcagaaaattaaaaaaatcatgcttccaaaagattatcttgcttatcgattgtgcggaacattttgtacagatgtatcggatgcttccggtatgcttttgatggatgtgaaaaataaatgctggtcaaaagaaatgcttgagatatgcagtattacagaagaacagcttccgaagctatatgaaagctatgaggtcgtaggatccttaaagaagaatattgccgaggaacttggaatgacggaagaggtaaaagtgattgcaggagccggagacaatgcggcggcagcggtgggtacaggcacagtaggagagggaatgtgtaatatttctcttggaacttccggaacgatttttatttccagtaaaaaatttaaagtagatgaaaataatgcacttcattcttttgcacatgcagatggaaactatcatttgatgggatgtatgctaagtgcagcatcctgcaataagtggtggtcagaagaaatattgaaaacaacagattttgtaaacgaacaggcaggtattacaaaacttggtgagaataacgtattctatcttccatatttaatgggagaaagatctccgcataatgatccaaaagtccgggctgcttttatcggaatgtctatggacacaacacgggaagaaatgacacaggcagttttagaaggagtggcatttggattaagagactctcttgaggttgcgagaagtcttggcataaatattgcgagaacgaaaatctgcggtggaggtgcaaaaagtccactttggaaaaagattattgcaaatgtcatgaacataaaagtagaagtgatagagagtgaagaaggaccggcgcttggagctgccatgcttgcagcggtcgggtgtggagaatatccggatgttgaaacagcgacaaagcaatttgtgaagactatcgataccgtagagccggaaaaggaacttgtagaaaaatacgaggaaagatatcagaaattcaaaaatatctatccggcggtaaaaaatctgttttagtctgaaaagcgtgggaatcgtttgattatctaggtttaaaaattttcctgaggtacggggattcgaaaaagaatagtgcaaatcagcataaagtcggatcccgtgccgggaattgcgaatgaattatgggtgggataggaaagcggtagagaagaaagagtaaagctttttgaaataaaatgaaaaatgtattgacagtttttgaataagatgatattatgaatgtcgctgcaaacagcagtggctatattttttgaaatgtttcaatcagagttaacaggaaatgaaaaataaaataaaaaaactgttgacaaagaaagaataaagtgataagatatagaagttgttgcgacaagcgataacgaaaaaataaaagtaaaaaagtgcttgacaagtaagaggcgctgtgataaaatgaaacagctgattacgaaaagcaaaacagaacattgataattaaacaatagacaacacaaccctgaaaatttcgaacaattgagaaaatttcagaacagacagaaatgtcaacctaaaaacagtaaaagggataggattgctagtagtgattcttgactggaaacaaacacttttaacgagagtttgatcctggctcaggatgaacgctggcggcgtgcttaacacatgcaagtcgaacgaagcgcttgaatggaattcttcggaaggaagctcaagtgactgagtggcggacgggtgagtaacgcgtgggtaacctgcctcatacagggggataacagttagaaatgactgctaataccgcataagcacacgtgatcgcatgatcgagtgtgaaaaactccggtggtatgagatggacccgcgtctgattagctagttggtggggtaatggcccaccaaggcgacgatcagtagccggcctgagagggtgaacggccacattgggactgagacacggcccaaactcctacgggaggcagcagtggggaatattgcacaatgggggaaaccctgatgcagcgacgccgcgtgaaggatgaagtatttcggtatgtaaacttctatcagcagggaagaaaatgacggtacctgactaagaagccccggctaactacgtgccagcagccgcggtaatacgtagggggcaagcgttatccggatttactgggtgtaaagggagcgtagacggcagtgcaagtctgaagtgaaagcccggggctcaaccccgggactgctttggaaactgtgcagctagagtgtcggagaggcaagcggaattcctagtgtagcggtgaaatgcgtagatattaggaggaacaccagtggcgaaggcggcttgctggacgatgactgacgttgaggctcgaaagcgtggggagcaaacaggattagataccctggtagtccacgccgtaaacgatgactactaggtgtcggggagcaaagctcttcggtgccgcagccaacgcaataagtagtccacctggggagtacgttcgcaagaatgaaactcaaaggaattgacggggacccgcacaagcggtggagcatgtggtttaattcgaagcaacgcgaagaaccttacctgctcttgacatccctctgaccgctctttaatcggagctttccttcgggacagaggagacaggtggtgcatggttgtcgtcagctcgtgtcgtgagatgttgggttaagtcccgcaacgagcgcaacccctatcttcagtagccagcggtaaggccgggcactctggagagactgccagggataacctggaggaaggtggggatgacgtcaaatcatcatgccccttatgagcagggctacacacgtgctacaatggcgtaaacaaagggaagcagagtcgtgaggccgagcaaatcccaaaaataacgtctcagttcggattgtagtctgcaactcgactacatgaagctggaatcgctagtaatcgcgaatcagaatgtcgcggtgaatacgttcccgggtcttgtacacaccgcccgtcacaccatgggagtcagtaacgcccgaagtcagtgacccaaccgcaaggagggagctgccgaaggtgggaccgataactggggtgaagtcgtaacaaggtagccgtatcggaaggtgcggctggatcacctcctttctaaggaagaaagaagtaaggattgaagaagtctattgtttagttatgagtgttctgaaaagaacgaaaagcttctggtggcgatgcgctgaggggaaacacccgtacccatcccgaacacgatggttaagacctcagcggccgatggtactgcactggagacggtgtgggagagcaggtggctgccagatttataaaaaagatactggatttaccagtgatcagaaaactgaaaagatttagctttctgatgactgataaaacagtcaatatgtaccttgaaaatcgcatacagaaatgaaatgataagaaaaatatcaagacatccgaggtgatcatggaagcttgcaagagcagaaatgagaactgattcgagaaaacgaataaaaacaacaaactattgccaacgcatatcacgctagatatgtgtagcggagtccatacccgtggacgaagcaagttggttatgctagaaagagcgtatggtggatgccttggcactaagagccgatgaaagacgtgataagctgcgaaaagcttcggggaggagcaaatatccaatgatccggagatatctgaatggggaaacccggcggagcaaacctccgtcatcttaacgccaatacataacgttaagaagggaacccggtgaactgaaacatctaagtagccggaggaagagaaagaaacatcgattctgtgagtagcggcgagcgaaagcggaagagcccaaaccgggatgcgtgcattccggggttcggactgcgtaagtgatgagtaagcctagtagaatggttttgggaaagccagccagagagggtgaaagccccgtacatgaaaggcgagcgagcacggcaggatccagagtaccacgagacacgagaaaccttgtgggaatgagcggggaccaccccgtaaggctaaatactccttagtgaccgatagcgcatagtactgtgaaggaaaggtgaaaaggaccccgggaggggagtgaaagagaacctgaaaccatatgtttacaagctgtggaacatctttatatgatgaaccgcgtactttttgtagaacggtccggcgagttacgctggctggcgaggttaaggactgaaggtctggagccgaagggaaaccaagtctgaatagggcgtgaagtcagtcagagtagacccgaaaccgggtgatctatccatgtccaggttgaagttgccgtaaaaggcaatggaggaccgaacccacatccgttgaaaagggtggggatgaggtgtggataggggagaaattccaatcgaacccggagatagctggttctcctcgaaatagctttagggctagcctcatacgagtcttgcggaggtagagcactgaatttcctagggggcgtcaaagcttaccgaagaatatcaaactccgaatgccgcgtagatgatgtatgggagtcagactatacgagataagttggatagtcgaaagggaaagagcccagaccaccagctaaggtcccaaaatgtgtgttaagtggaaaaggatgtgggatttcgaagacaactaggatgttggctcagaagcagccatacattcaaagagtgcgtaatagctcactagtcgagaggtcctgcgccgaaaatgtccggggctgaaacacactaccgaagctgtggaattgatctgatcaattggtagaggagcattcttaaagggaagaagctgtaccggaaggagcagtggacttttaagaagagagaatgccggaatgagtagcgagaggaaggtgggaatccttccggccgaatatctaaggtttccagagtaaagctgatctgctctgggtaagtcggggcctaaggcgaggtcgaaagacgtagtcgatggacaacaggttgaaattcctgtactatgatataacagaactgtggggacacgtgtggagagcgggagccgggaatggaaagcccggtgcaagcgaagtaggagaggagttggcaaatccgcttctcaatctgaagacgtgatgcggaccgaactgagagtagggaagcccgtgagccatgcgtcaagaaaagccgctattgtttatatcatacccgtaccgtaaaccgacacaggtggatgaggagagaatcctaaggccgacgggagaagcattgttaaggaactcggcaaaatgactccgtaacttcgggagaaggagtgccagtgagaactggccgcagagaattggcccaagcaactgtttagcaaaaacacaggtctatgcaaaaccgaaaggtgaagtatatgggctgacgcctgcccggtgctggaaggttaaggggagaggttagcgtaagcgaagctttgaacttaagccccagtaaacggcggccgtaactataacggtcctaaggtagcgaaattccttgtcgggtaagttccgacccgcacgaaaggcgtaatgatttgggcactgtctcgacaatgcacccggtgaaattgaaataccagtgaagatgctggttacctgcgccaggacggaaagaccccatggagctttactccagcttgatactgggattcggtattgcatgtacaggataggtgggagactgagaagtatttacgccagtagatacagagtcgctgttgggataccacccttgcagtactgggtttctaaccagcagccgtgacccggctgggggacaatgtcaggtggggagtttgactggggcggtcgcctccgaaagggtatcggaggcgctcaaaggttccctcagaatggtcggaaaccattcaaagagtgcaaaggcagaagggagcttgactgcgacaccgacgggtggagcaggtacgaaagtaggacttagtgatccggtggtataaagtgggattgccatcgctcaacggataaaagctaccctggggataacaggcttatcactcccaagagttcacatcgacggagtggtttggcacctcgatgtcggctcatcgcatcctggggctgaagtaggtcccaagggttgggctgttcgcccattaaagcggtacgcgagctgggttcagaacgtcgtgagacagttcggtccctatccggcgtgggcgtaggatatttgagaggagctgcccttagtacgagaggaccggggtggactggccgctggtgtatctgttgcactgccaagtgcatggcagagtagccaagccgggacgggataaacgctgaaggcatctaagcgtgaagcccccctcaagatgagatatcccaacgcaagttgtaagaccccttgaagacgacgaggtagataggacagaggtggaagtgcagtaatgtatggagctgactgttactaatcggtcgagggcataaccaagtggtgataggagaatggatgaagagagaaaaacttagaaaagtagttgactgtatgtgattttgaaggtataatatcttcaggttaatcctcaatagctcagtcggtagagcactcggctgttaaccgagttgtcgttggttcgagtccaacttggggagtttagaaatgattatttctaaaagtgaaaagacgaataaggctccttggtcaagcggttaagacatcgccctttcacggcggtaacacgggttcgattcccgtaggagtcatttgagcataaatggttcatttggctcatataataaaatatataagttatggcgccatagccaagtggtaaggcaaaggtctgcaacacctctatcaccagttcaaatctggttggcgccttagaaagtatcgaagtgattcggtactttttttgtgcggtaaaataggttacctctgataattattgactttcactaactaatattatatactatatctagtgaaatatcgatgaagggagtacatctatggaacagatgactataacagcaaaagttcaaatagtcgccacggatacagataaagttttgcttgatgaaactatgtctgtttatcgtgatgcctgtaattatgtttcagactatgtattccaaactcatgatttaaagcagttttcacttaataaggttttgtattctactctaagagaaaaatttggtcttaaatcgcaaatggctcagtccgttttgaaaacagtcattgcaagatatagaactattctcgaaaatcaaaatgagtggatacaaccaaccttcaagaaacctcagtatgatttagtttggaacagagattattctttaacgcaaaactgtttttctgtgaatacgcttaatggtcgtgtgaaactgccatatttcgctgaaggtatgtctaaatattttgaccatacaatctataagtttggtacagctaagctcacaaacaaacatggtaaatattatcttcacataccagtaacttatgatgtcgaagaaagtaatatttctgatatttgtaatgtcgtaggcattgacagaggtattaacttcgttgttgcaacctatgacagtaatcacaagtctggatttgttagtggaaaagctatcaagcagaaacgtgctaactattccaaacttcgtaaaaaactccaaatgcgacaaactccatcttcaaggcgaagattaaaagctattggtcatcgagaaaaccgttggatgcaagatgttaaccattgtgtatcaaaggcactcgttgagaacaacccaaagcatacactctttgtattagaagatttgtcgggtattcgtaatgctacagagcgtgtcaaaaccaaagacttttatgtttctgtatcgtggtcgttctatgatttagaacagaaactaatttacaaggctaagcagaatcagtcttcggtaattaaggtagaccctcattatacaagccagtgttgtcctatttgtggacatactgaaaaggccaaccgtaacaagaagatacatttgtttacttgtaaaaactgtggctataagtccaatgatgaccgtataggagcgatgaatctgtatcgtatgggaataaattatcttgttgatagccaagtacctgatacagttgtaacagagtaaactttgttacaaagggtgttgtcaaccaccctatgatgtaacgccactttagatagcaatatctattggggttaaaggtcggagacgtaagtcgttagtacgactgggcagttacaagcccatgacctttaggtcgtgggtagttgacaagaaataaaaaaagagagggcaaactaacataccctctctttttttacttagtggataagatttttaaaactcaagtccaaaattcatttcataataatttccttcgctgtcacggtaagcatatgctttgccgttctcatccttcatttcttccggcatatagaagtctttgtcatatcccggtacatcgttgcgagatacgcatacaccgtcagcgttgacagcaagaacactgtcatcttttggaagggtgatcggcatttttccgcttggagtataggcaccggtgataatgtcaatcgttgcttccgggaacgtgtcaaatccagcgagcagtgcgtcagaataacgttcaacatttcccaccatccatgcgagtgtaaagttaatattggaaatcacttttcctccatttgcatggattgcttctgaaatcacgcggatctcatcagtgccaagaagtgttgtttcttcgtgtgtcgcctcagctggtcttccgagatcgtcaacatcgtggacagttttgttctcgcagatatccagttcgagatatccttttgttgcgttgaagtattctccggaacttggacttgcaaagaggaatgcatagtcagcatcctcgtaatgatctgtaagtgtcactcctggagtttcagctaagatgctgtgcagtttttctgtaagcgccttggcagtctcttcttttgacgcaaatccttttgcaaagatttttttgtctgcaagtttttctgcggtcagaggaagaagctgttctttgtttttcagaaggacaacagatttgcggtgtacgtcatcggcatgtttccagtgtaccggatttgcaatcacttcttttgcagtctgcggatcacggtatgggttttcaaagacaccaagttcgaacatttcttttaatgtgtgtgcggccgcagttgtgagagcttcttcagataatgtgatctgctctaatgtatatccgtcaggaattttgtgcgcaccgtctgtatagtagccatttgttcttctatctaaagcttcttttgcggcaaatacatcaaaggaaccgctgatgatatcgacaccggaattgacagcaagtgcgattctttcaggaatgtcaagttcttccacaccccatgccatattgatggtgataccggagtcgctgttgatatagccttggaagttcatctgattttgcagaagttcctttaagaaaaactggttaaacgcaaatccaactggaatcatttcaatcggatttccattcatgtcgtactggatgccgctcttttcagctgcaggttttgcataataaggcatgatagaggatacgtggtttgcaatagaagaccggaatcctggcagatggtatttctgtaagctgtcttctgtctggtagacattccattgtccttgtttgtagtgtgggtcaaatccattttcacgagcaccgccgccagggaaatgtttgacagtcattgcaacaccatctgttgttacaccatctttgcttccctgaatgcctggaacaaggcggtcaaaaatattgttgatcagttctggatcttcgccgaacgtaccgtaagtacgctgccatcttggatcagatacgacgtctgccatatacatatatccttttttcattccggttgcatcccattcttcacggatgcattctgcaaaatcatcgatcaggtcaaggctgcttccttttacggcagcggcaattcccattgttcccggccatgtggcaaatacaccagcggcatcgttcataccgaagacgatctctccgttttcgtttcgggagtttgataccatgagaaccggaatcgcatgtgtctcgccttcagcaagtgcattcagttcgttcatccagtctgcaagctcgtccggttttggattttcgcgcaggataaagtggcggattcccatatcttttaccgtataggtggttccgtgatatttttcggcgttaaagatcgtagtgtctttttcaattactttttcatcaagaagtccggttgcatcgactgcctctttgtctttctggtaagctcccatttttaaagaattgatgaagagcagaccgatcttttcctcggaggaaagttcctctgcaagtgctttggcacgttcggaaggagtttttctccagtctttgtaagtatttaatgttccgtcaccgtttaagtctttgaaataaagaccatcggattcgatcacatctttggctgttacaccgatcgtaggcccatttgggttcttatagtagcggatcatttctgttgccttttttgctgacattattttttctccaatcttataaatttatttttccagaaatgtttgcggcaagcgttttccaatcaggaaccacttggaaaatccggaagaatatacttttattttatcgtattttgtgagatgagatattaagaaatatgctataatattattgaaatatgctgtcaaatgaaaaatagcggacagtaaaaggtatgtaaaaataagtctgattttcgaaaataaggtttaggaaagaatagggacgagcgaggaagaagagttgtgaaaggagaggaaacatgaaaacacatgaagaactggtgcagactgccagagtgctgcacaaggcgctgaaggttgacttgacaatctacgacagtgacagagactgtattgtgaaattcacaaaaaacccatatcccgaggaattgtgtggaaaactttgggagcatccggagaaaatgtggaaacatcttgggaaagcgaaggaagatagtgtttcttatcagtattttccagaattttatctcgtctgtatgaatctgaaggtcatagaggaggacgagagctattatctgtcagcaggaccatttctgacggagcattattcagagcagcttgtcttgaaaattcttcatagccagaagctgtcactttccagaaaagggaagtatgaactcttgtattcacagcttccatatttttcaaaccgggtaaaatcgatggcagatgtcctttcgtatctgatcaaagtttgtcctgagtggaaacagatcccgatcatatatgaggagatgcccgggcaggaggaatgtgtgaaagaaacaaggagagaaagggaagggctgttagagaagacagatgttttgctaaattacgagacggaacggcgatggagggctgcggtggaacaaggagatttccagatggcaaggcgtggaatctctcagatgagtaaaggagaatttttctatcgaaccccggataatccgcttcgttcacagaagaatcttttgtttacagtcaatacgatctgcagaatcgcggcagtggatgggggagcagatgttgtgagagtacacgagatcagtgatttgtttgcgatccgcatcgagcaggcgagaagcgggttggagacaacgatgttggaagaggagatgttgcgcgcatattgtcagattgtgatggagacgaagacgaggggacattcagcgcctgtggcaaaagcaatccagtatatgtatgcacattttgatcagccgcttacaatggagaaaattgcggaggcgattcattttagtccggggtatttgtcgagaactttcaaagcagagatgcatgtgacagtcggagaatatttgaaccggcttcgcattgagaaggcagagggaattttaaaaacaggagatttcccggttatggaggtcgcgattatgactggattttccagttatgcgaaattcagtgtagagtttaaaaaatatacgggaaaaacagcgcgggaatatatggcagccattcattgactatccaaggagagtttgctatgatttcataaaataaatggacaaaggaggacgctatgagacaaaagataaaggaccggatgcgggcactgaaaatggagattagggagcacaagagttcttttatagtgtatgtgacccttcgcgcacttgtgatccttgtgatgattcttcagatattcaatcgaaattatgaaggggttttctactgtatactgaccttgattcttctgatgattccaagctttattcagatggaactgaagatagaacttccgacgacactggagatttttatattgatcttcatttttgcggcggagatactgggagaaatcggttcttactatacaaaggtagcgaactgggatacgatgctccacacgatcaatggattccttgcggcggcgatcggattttcccttgtagatattctgaatcggaatgaaaaagtgaaagtacagttatcacctctttttatggcagttgtggcattttgcttctctatgacgatcggtgtcatgtgggaattctgggagtgtggaatggatttgtttttgggtatggatatgcagaaagatacgatcgtacacagtatttccactgtgatgctggagccgaccggagggaatcgggtagtgcatattgataatattaaaaatactgccgtcaatgggatggaattgggcttaggaggttatctggatattgggctgatcgatacgatgaaagacttatttgtcaatttcatcggtgcggttgtattctcaattatcggattcttttacgtaaagcagagaggaaagggaaaatttgcaaaccgttttattccaaggatcaaagatgagaatgcagatttcctgaaaattgtggaagaggatagaaaagctgaaaaagtccagaaagaggattctgacagcaatccctagtatataatagagacaaaagagaatagactacatagggaacgggaaaactgaaagaaagttctgagatgcatataagaagcgaaatcggcataaaaaaattaagataagaaaagaagcgggaatcgaatgagaaagagcgtgtggaaaaaaagaagaaggatcattttgataatctgtgcaggcattttcgcgggaatcacgctcctgacggggacaggaagcggtggaaatgtatttgcacagagggtcgatgaaaacgaggcaactgcatctggggaagccagacaggatggtagtatccagaatgatcgtgttccggatgatggtgctcgaaatgagaatgttctgggtgatggagaccaggcggagaaatctcaggaggaacaaggggagatttttgtaaaggatgtgctggaagaactcacctatatgagagtgaggcttggcagacgttatctggggagagaggcagagtatgatatttacggagcaagaaccattgtgcagccaaatgagggagaaaagcagattataatccgagatgggaattgtgcagaaattttttatgggacatacagaggtgtgaaagagtatgagtcttacacagagctgtcagatatgttggatgcacagttctttttacttcccattatcaacctggaattgacggatcagaggattaaagaacagaattatgagatggaatttacagaggaagagcagctcgaaggatttctgacggcactttcttatgtgggagcagtggatattgaggcggtacagcttacggcagtgagaattcggtttgatgaaatgtatcggccggaggaggtacagtttcatctgcagtcagagacgattgcggaggaggatctccggactgtggagcaggaactgcaacagcagtatgcttacgatgatgttgtggaagaagtatcctttgaggacaggtacaatgaaattttgctgaagatacaggaaattgtcccggagaaggatgtgacggcagaacagtatattgaagatttgtcaaatgtggcgcgggcagcagatgagagttttcttgcgattttgagagaccagtcaaagcaactgataaagaaggatggctgggatcgccgagcagtatttgcctatctggaagcaatcgatgcaagattcggggaatttcgggaagattctctgacagagatccctcaggaaacctatttaaaagaactggaagatacatttgcagaagtacacaaggttggctcgggtgtctacacctatatgtttgaagtcagtgggctgaaagcgaaagagaaggcgcaacttgtcatctctcagatgggtggctatatggatgggaatgagatgcttcagttggcaggtgagtatcagtttgacagtgagatgccgccgcatgcggaatttctggagtcctatgctgcctgtgtacggactgcatggcagaagaagagtggatcgtataaaatactggataatcagaaagtacatcaatttcgaatgtacatcgacaggcagaatattcagtatgtgagaagtcattttgccgggaagactgattatgaaaagctgcaaaattatgcgaagcagtatgagttttctctatattatggggaaccttccagacatcacaataagattctgcgcaaaggaagatttgaagtgcaggaatatgacaaggtgctgacaccgaaccggttgtcagaatttattatcgacgtgcagacaggagcctttattacggagtgggatattttgaaagtggatgaagtaacaggaattgtgagtaactcggaggcatatccaaagcagaagacgatcgaaggcaagacaattgttgacacagagtcttttaactatgcacctgcaaattatgaggaggctcaccaatgtctggatgtgctgccggcctctccggacaagaaaaagggggacgcaacctatcttgagaatcaagtgaagaagacaatgaaaaaagtgtggaagagtcctgaaaaatatcattacagagagcggtatcgttctgcgaaggattataaaaaggaaaaataaaagggcagtaggaggaaaccaggatgaaaaaggagagaaagtggctgtgtggtatactggctgcagtgatattgggcaatatgaccggctgtgcagagcagatttcgggcaagacaacggtaaatcgtattctggcagaagaatcttatattaatgtcatacttggagagggttatcatcagcaggaagtgcggtttgatctgaaaaatgacagagcagtgattccgaaagatgtgcagtgggggatgcacagttatcgaaacggaattgaggtcggaatttcctacggagagagcgaagggtgtgagatctatgattcagatccggaagtaaatccagaactgtatgaagaatcttatttggattctattcgaaaactcaagttgaatgtgtcggatatccgaaaaaataattataatatcaaggttgttaaaaaaaagcagctggaagcatttgaacaggaacttgcgctgatgtcgggagttgtgatcaagggggaatatgaactgacaggagtcaacattgaatttgaccggagattccgaccagtcaaaaagacctttcgacttcaggcgctggatgagtcgcaaatgcatgaagagaaaaaagacgagaaaaaatgtattcaggaatttgggtataatataggaaaagtccggtttcagacttcttaccgcgatgtcgagaaaaagatacagaaagagtggaagaaaattttggaagcagagagaactgaggcacttcttccctacaggaatcaataattgcaatcaagccatgaatgtgctacactccaactatacaaaggaagctttgcatatgaggaggtgaaagagaagcggttatggcaaaaaagcaggaaagatcaaggaaaaaaggaaagaagaaaaaatcaggattgctgagcaatcttattttgatactggcagtgtgcgtatttgtattttccggctatcagctctaccagattttttccgagtaccatgaaggaaagaaggagtacgaggagatcagagaacttgtcattcaagaagagccaaagaaagaaccggaagaagagaaagaaccggaagttcagccacgctttacagttgattttgcgacattgcagcagatgaatcccgatactgttggatggatccgctttgaggagccgtcagagatcagttatccggttgtcaaaggcagagataacgaagaatatctgacgagaacttttgaggcgaatgacaacaagttaggaacactttttgtagataaagataataccggtacttttacagaccgtaatacaatcatttatggacacaatatgaaaagtggaacgatgtttgctcagctgttaaaatataaagaacaagatttctttgaaaaatatccgtatttttctatttatactcctgatggaaaagaatcaaaataccagatttttgtggcgggagttgtagaggacactgctgtaaattatcagtttgcatttcagtcggatgaggagtttttaaattacattgagacgatcaaaggaacatcactgtatacgccgaatgtggaaatcgacgcagcatctcagattgtgacactttctacttgcacaaatgttgctgatgaggagcgatttgtcgtgcaggcagtaaaagtcagtgaacagtaagacagacaaggaaggaaacggcagaggagggacaagagatggcgaatgtatatgaagtcggggacatcgtccgcatgaagaaaaagcatccgtgtggaagctacgagtgggagattcttcgtgtcggagcagacttccgtttaaaatgcacaggttgtggacatcagattatgattacaagaaaattagtagaaaaaaacacgaaagaaatcagaaaaaatgcttgaaatcagtagaatcttatggtatagtattgaattgtgatatattgttgtttgcagacaagcgtccgcgaacgatatttccttgttcctgacaaggttcagggaccaagagaccataaggaggtgcaagaacatgaacaagtatgaattagctgttgtagtcagcgcaaaagttgaagatgacgttagagcaggagtaatcgaaaaagtaaaagagcttatcgctcgtttcggtggaaatgtgacagacgttgatgaatggggtaagaaaagattagcttacgaaattcagaaaatgaaagaaggatattactatttcatccacttcgaatctgattctactgttccagcagagcttgagagcagaatgcgtatcatggaaaacgttatcagattcttatgcgtaaaacaagaagcatagagaaaagaggataaatcgtatgaataaagtaattttgatgggacgtctgacaagagatccagaagtgagatattcacaaggtgacagcgcaactgctgttgcaagatatacattagcagtagaccgccgttttaaacgtgacggagaggcaagtgccgactttatcaactgcgtagttttcggaaaatcagcagagtttgcagagagatatttccgccagggattaaaggttgttgtaagtggtcgtattcagacaggaagttacacaaacagagatggtgtgaaagtttacacaacagatgttgttgtagaagatcaggaatttgctgagagcaaagctgcaagcgaaagcagcatgggaagctaccgtcaggcaagtccaagtccatcaccagctccaagtgcagatattggagatgggttcatgaacattccagatggaattgatgaagaattaccattcagttagacgatacaatgagtagatttgtataaatataggaggtaataccacaatggcttacgataaaggtaacaaagctgattctccaatgaagagaagaggcggacgcagaagaaaaaaagtttgtgtattctgcggtaaagaaaacaacgaaatcgattacaaagacgtagcaaaattaagaaaatatgtttctgaaagaggaaaaattcttccaagaagaatcacaggaaactgtgcaaaacatcagagagctcttacagtagcaatcaagagagcaagacatatcgctttaatgccatacgttcaggactaagaaatgcagaggctaaaatctcagaaaagaggttttggtctctttttttgtctatttgtcaaaggctggggagaaagaagctcccttgcagttcggtgtaaaagtacattttgtatgagatcgagcagctttcccaggtttgtattatctaaataatattcgctattgaaatgaatgacagataagtctataataaatccatataactcaaaaaaatcagacaactgcaaaatgtacaggaggtactgcgtatggtgaaattatataatcaaggagtgtatctgttaaatgggtcagagattgtgccagatggagcagatgctgtaagggagatagaaggcaaggtgggacatgctgtttccaaagaggaagcggcaaaggagacgattgcataccgcattctgaaggaacacaatacgtctccggatatggagcacctcagaatcaaatttgataaactgacttcgcacgacatcacttttgtgggaattattcagacggcaagagcatcgggactggaacggtttccgataccgtatgtgttgacgaattgtcataacagtctgtgtgcggtcggtgggacgatcaatgaagatgatcatatgtttggactgacctgcgcgaagaagtatggaggagtgtatgttccaccgcatcaggcggtaatccatcagtatgcaagggaaatgcttgcaggcggaggcaagatgatcctcggctctgacagccatacacgctatggtgcgctcggtacaatggcaattggcgaaggaggaccggagcttgtcaagcagctgctgaataaaacatatgacatccgcatgccagaggtgatcgcggtatatctggatggacagccgtcaatcggtgtgggtccacaggatgtagcgcttgcgattatcaaggcgacttttgcaaacggatatgtgaataataaagtcatggaatttgtaggaccgggagtagaaaaattaagtgcggatttccgaatcggaattgatgtgatgacgacagaaacgacatgtctttcttctatctggaaaacagatgctgtcatagaggagttttttgagattcacggaagaaaagaggattttgagaagctttcaccaggtgagacagcttattatgacggaatggtatatgtagatcttggcaaggttgagccgatgatcgcgatgccgttccatccaagcaatgcctatacaatccgcgaactgaatcagaatctgagcgagattcttcatgatgtggagcagaaagcgttggtgagccttggcaaagatgtgaattttacattgcaggataaggtgcggaacggaaagctttatgtggaacagggtatcatcgccggatgtgcaggtggaggatttgaaaatatctgtgcggcttccgagattctttcaggatgtggaatcggagcagatgagtttacactcagtgtgtatccggcaagtacaccgatctacatggagctggtaaagaatggggctgttgcaaaattgatggaagccggggcagttgtgaagacagcattttgcggtccgtgtttcggtgcaggggacaccccggcagatggggcgctcagcatccgacattctacaagaaacttcccaaatcgggagggatcaaaattacagagtggacagattgcttctgtagctttgatggatgcaagatcgattgcggcaactgcggcgaataagggataccttacatcggcggcagatgtgatggacagagaatatcagatgccgaagtatcattttgatggtaatatttatgcgaatcgtgtctttgacagtaaaggaattgcagatccgtcggccaagattaaacttggaccaaacattaaagactggccggagatgccgccgcttccagaacatctccttttgaaggtagtatcagagattcatgatccagtcacgacgactgacgaactgattccgtctggagagacttcctcctatcggtccaatccacttggattggcagaatttgccttgtcgagaaaagatccggcatatgtaggcagagcgaaggaagtgcagaaggcacaaaaagcaattgagcaaggacaatgtccgctggaagtgttggaagagctgaaggatgtgatggaagttgtgcgcaggagatatccgcaggcaggtgagggggcacttggaatcggaagtacgatatttgcagtgaagccgggcgacggatctgcgagagagcaggcagcctcctgtcagaaagtacttggcggatgggcaaatattgcagaagagtatgctaccaagcgttatcgctcaaacttgatcaactggggtatgctcccgcttttgacagacgaaaaggaagaacaactatcgtttcacaatggagactatattttcttcccggatattttagaaaaaatcaaacaaaaggaaaacaagattacagcttacattgtaaaagatgatctggtggaggtcacattccggttgggagaaatgacggagaatgagcgagaaatcatccagaaaggctgtctgatcaactattacagggaccagaacaggtaagtgctataggatcctgattagattatgaggagaaaaaacagatgaaagagaagttatatacgattccggtaaatgatgcgtttcgggaggactgtgaatgtcctctctgcagtatttaccacaagctggaacaggatgctcttgaatatacactgcgtccatctacttatatggtaagtgagcgcagggaagagagtgataaagtaggattttgcaaaagacatgcggcgatgttaaatgagatgccggatcggctgggacttgcactgatctataagacgcatatggattcttttatcaaagaaattgaacaaaggcagaaagaaccggtaaagcaggcatcgtttttcaagaaaaagacagaagcctcaggattggctgcttatatcgggcagttggagaaatcctgctttgtctgcgagaagattgagaagactttccatgattatttaggtacaatctttcatctgtataagaaagaggaagaattccggaaattgtttacctcctcgaaaggattttgtacaaaacattacgggatgctgtatgagatggcgccggaaagacttggtggcgctttgctggattcctttatcagtgaattgaatcagctctatctggaaaatatgaagcgcgtgcgggatgaccttagctggtttgtcgataagtttgattatcgatttaaggatgaaccgtggaaaaattccaaagacgcgcttccaagaactttgacaaaagtaaacggcttataaaagcagagctttcaaccgcttctggatcgtaagaccggcgaagagggcaatcaatatttttgtaatatcaaaaaagagataaggaactactccgatcatcagaccttctgcaaaggataggtggagttgtacacagagccagacagttccaaacagatagtttactgcggagccgagcagcattccaatcaagatgactgcaggtttttttaagaatcgctctgcaatccacccggagaggattgtgagaaagatcattccgacaaggtagcctccggtcggtcctgcgagttttccgagacctcctgcgaatccggagaagacaggaagaccaatggctccgaggagaagatagacgagatagcttacagtggcggctttccatcccagtataaagatactgatgtataagaccaggttggtcagagagaggggaaccgggctaaatggcagcgggatggaaagcggcgctaaaatacaggtgattgcggtaacaagtgcaatccgcacaagcaggtgcgtccggacttgtggatgtttggtagttgctgaaggtattggattcataagtgttgtaagttcctttcttttgctaaaatttatggcgatcaaatatattgtgtatcccatatgaagcatattataatttgaggaaaactaaatgtcaacatatttagaaataaagttaacaattaaaacaggaagtgtatgtccaaaagtctatgacggaatagaaataaaattaattgataataaaatcaaaaataagataaaaacagaaaatataattatataaaaagaaaaataaaaaaacatataaaaaactgttgacaaaacagaaaatataatgtattataaactcaacaaaagaaatccaaagaaattaaaaaagtaattttcatacaaaattttctaaagattctagaagaatttgaatatgacaagtagacggaaaaggaacttttgaaaatatttcagataaccggaagcggatacttgaatataaaagaaaaaatgagagttttgatttatgaagacttgaagaaatttcagaggatagatgatcggaaggaggctgttaccattggatatgacatcgtttacaattcaatatgtgagtggtcgggcaaataaaagttcctgcgagaacggcctttatcatagatagttcgatgatgaaaaaataatgaagaaagtaatcggagaaagaaaagctaccatatgatttagaattgcagaacatattgaataaggaaaatagaccacagaagttcggagagtttagaggatgtgtaaagaaacatctaataaaaaatcagaaacaatatatataatcggtacagagagaattaattttatatgagtagcgaaaagggtattgatatgaaatgatttgaaggaggaaagcaatccgattataaaaaacgaacgagaaatggtatcgaagatttggaaatcggagaccttaagaaaaatcgaaatcaattaaagattgattatgaaaagaatgaaggccggcaggaacagaaagtgttagcttctccgctgagaataaatagaatggataaagataagatttagatagccattataatttcaaagaaaattataatggctatttttttgacagaatggagttggtgtgataaactatgatagtattggagtaagcaaatataagaatgggaagtaaattataatagatgaggtgattgtattggataaatatgaatatcgcgtaaagacagagcagatgctcgagtatatggaacaaaaagcatatgggaaggcgatggagattgcagatacgattgattggcgtaaagtaaagaatgcgtctatgctctgttctgtaagtgagatttacgagcagaatgaaaagtatgaaaaaagccgcgatgtcctattcatcgcatatgatcgcaccccgggaagtagaaagattatataccggcttggaattttagctctcaagcttggagagccatcggaagcgatggactgctatgaggaatttgtatcagtcgcaccgaaagatccgaaccagtatattttacgttacaagattctgaaagcacagaatgctccaattacacagcagattgaagtactagaagaatttaagaaagcagaatatatagaaaagtgggcgtatgagcttgcaaaattgtatgatgaggcagggatgatcacggaatgtctggaggagtgcgatgatctgattctttggttcagtgaagggaaatatgtgtatcaggccatggaactgaagatgaagtataagcctttgacacctttacagcaggagaaatacgatcagaaacctggcggaccgatgacgccgagccagaagtttgttcagaaattaagagagaaccagttggatacgtctactgcaacgattccgactggggaagtgaaggaagcaataaaggaaccacagcttcaaaagcaagtgacaggtcagatgaagattgaagaaatccttgcaagctgggaagaaaagcagaaagaagtcatggaagtcatcgagcagaaacgtcaggaagcagaggccgacaaggagattgtggaactgaagtccgaaccggaaacagcaactccggaggatgtccgccgactgatggaagagctggaaggaaagaaagaggatgaagctttagaggaagcatcttcttcagagcctatggaagaggaagcggaaccggaagtcatcgaggaaccaattgaagagcagacatttgcagaagaagattttgaagaatgttttgatgatgagattgatgaggaactcgaagagtttgaagaactggatattcctgaatgggatgaacaggagatggaggcgatgacagaagagccggtggaggtgatcgaagaatctgaggaggaagtgatcgaggaaccgatcgaggaaccggagagtatttttgaagagatgtcggaagaggatgccgctcaggtgctgtcggaagaatcggaagtacatgaggagacagaactgtacgaagaggaagaaatttcgaaagatctgtcagaaggacaagaagagatggatccggaagacgatgatgaagacagctttgatccgaatgattttgaagaagtagaagatggatatgatatccgtgactttgaagaggaaatagcagcttttgaaagagagagaaaggaatcggaggaggacgacgacgatgattttgaccttctgaatgagacgatccctctttcgagaattgaagtggcaaaagcggcagcaactggtaagacaggaaagattccagtagatgagattgcaaatgcactgggagctacgggaacttttggacagggaacaaccggatttactgttcaggcaaaatatgatctggaagcacagagtgaagtgggacttcgtgccggattgacagaagagcagaagaaattattctcttattttgtaccagtaagaggaatgagcgaacagctggtagatgttttagagcaggataagcagtgtacgaatcgacagggaacgtcaaagacaggaaacttgctgatcattgggcgaaaaggttccggtaagacggttctggctgtggatgtggtaaaagcaattcagaaacagagaaaattaaagcagggaaaagtagcgattattaccggagattctctgaataagaaaaagatcaaagagatcgtatcgaagttatatggaggcgctctgatcattgagaaggccggaagaatgaatgaaaagacagttcagcggttgaataaggctatggagagagataccggagagcttctgattgttttggaggagcagagaaagcctttggatcgtctgttatcttctaataaagaattcagaagaaaattcacctctcgtctggaagtgccgatctttatcaatgatgagcttgttacatttggtcagacatatgcaaaggaaaatggattcaagattgatgaagtaggtattctcgcactgtacagccggatcgatatgctccagagagaggatcatgttgtgacagtagcggaagtcaaagagatcatggacgaggcgattgaacatgtgcagaagacaaatgtcaagaaaatcgtcaagagagtgttaggaaaaggaagagatgacgcagaccgcgtgatcttgtctgagaaagatttcaatatataagacgggaaagagtctggatacaaaagaaaaaggtaatttttcaagaaaaaaagagaaaatttttggagaaaaattacaaaaaaagagttttgacaaggtgaaaaattgtcaaaactctttctttttgtatgggtctaaagtataatgaaagaaatatcagtaaatggactggaaaggtgaatgatatgggaaaagcaatgaaaaagaatacgaaaatgtcgtatgaaataggagagctggatcaatatctgtttggacagggtacacattatgaaatttataaaaagctaggtgcgcacaaagcaaagaagggaaagaaagaaggaatctattttgcagtatgggcacctcatgcacaggagatatctgtcattggtgagtttaatcagtgggatcgaacagccagtccgatgaagcgacacgaacctcttggaatttatgactgttttgtgccggaagcaaaagaagggatgctgtataagttctgcattcggacacaagaaggagagtatttatacaaggcagatccatttgcaaattatgcggaagtaagaccaggtaccgcttccagaattgtggatatcgaagatttgaagtggacagacagtaagtggatgaaggacagagaaacctgggatcacaatcatgagccggtgtcgatttatgaggcacatatcggttcctggaagcgtcatccgagggaagaggaagatggattttatacttaccgggaatttgcccacgaggctgccgcctacataaaagagatgggatatacacatattgaactgatggggattgcagagtatccatatgatggatcctggggatatcaggtgaccgggtattacgcaccgacttcccgctatggaacaccggaagattttgcgtatatgatcaattatttccacaggaataagattggggtaatcctcgactgggttccggcacattttccgaaagatgcacatggcctcgcaaattttgatggggcaccattgtttgaatatgcagatcccaagcagggagaacatccggactggggtacgaagatttttgattatggcaaggcagaggtaaagaactttctgattgccaatgcactgttctgggtggaaaagttccatgtggatgggcttagagtggatgcggttgcctcgatgctttacctggactatggaaaggaagatggacagtggattgccaataaatatggtggaaatcagaacctggaggcgatagaatttttcaagcacttaaattccgttgtgcttggaaggaatcaagggacgatgatgattgcagaagagtcgacagcatggccgaaagtgactgcagagcccgagtatgatggtcttggattcagcttgaagtggaatatgggttggatgcatgattttacagaatatatgaagttggatccgtactttagaaaagggtgccacaaccagatgacgtttgcgatgagctatgcttacagtgagaaatatgtacttgtcctttctcatgatgaagttgttcatttgaaatgttctatgatcaataaaatgccgggacttggctttgacaagtttgcaaacttgaaagcgggatatgcatttatgatgggacattccggcaagaagctattgtttatgggacaagactttgcacagctgcgggagtggagtgaagagagagagctggactggtacctgcttgcggaggaagagcacaggcagatgcaggcatttacaagagatttgctccatctctataagaagaacaaagcattgtatgaatgtgatgttatgccggaagggtttgagtggatcaatgcagatgacagggagcgaagtattttcagctttatcagacattcgaaagacgataaaaagaatttgctgtttgtatgtaatttcacaccggtggcaagaccagattaccgcgtgggagtatcaagaagaaaacagctgagattagtgttaaacagtgatgagaagcagtatgggggaaccggtgcagaacgtccggtgatctataaaccgaagaaacaggaatgcgatggaagatcgtattccatcggctacgatcttccaccatatggtgtggcagtatttgaattttaataggttaagaacgggtataggagagcatctccagaatacgtttttttaagacttgtctggaaagaatcccgctcatcataccgagcgcttctccgtgggaaaaaagaaggaatgtgggtacgatttcgatcccgcattcctttgtcagtttttcatatttttctgtatcaatccggactactttcaggtctttggcaaagtcgttctcaatctcatcgacaagaggaagcatcatattgcatttggggcaccatgtcgcaaaaaagacgacaagtacaggctgtttttctttgaaaatataagaatggaaaaaattattttccagagcagcagccatgtggatcacctccgggacatctgcattttgcatttaaaatgtgatatacttctacccaggatctgcggatcgcacagagctttttctttagaaatggcttgtcatacagataacagttcatcttacatttcatacggttacagcatttcataaaaagactccttttcttcttactatatgcattggaaagaactgcgtgatgcgatcagtttgtggatcgggttgcccatggatgagaatttctgttcatattccgtcattacatttccttcattcatgacaggatcatggtgaaggtcgaaagtgtgagcattcaatgtccatcctgcttcggtcacttgttccaaagagaagtcaaagagcggacggttgtctgtcttaaattctactgtgccgtcggctgccagcacacgatcgtagcgggcaaaaaattctttggaagtcagtcttcttcttgcatggcgtgctttcggccatggatctgagaaattcagatagatcttttccacttctcctttttcaaatacctcagagatatctgcagcatccatgcagataaagcggatgttcgtcagtccttcgtactcctcggagtcgagcttttcaagagcgcgcagaagaacactggagtagcgctcaatcccgatgtagttgatcgttggatatttctttgcgagggtaagcaggaactgtccttttcccataccgatctcgatgtggatcgggtggttgtttccgaaaagggtatgccagtttcccttctgttctgtctcatttttgatcgcagcagcatgtgctaaaatcacgtcatctgcatgcggtatatttctaagtctcatagatatcgtttctccttctgtttcaaatcggattttattataccatttttgtgtgaaaaagcaaagaaaatcgtatcagtggaaatgtgaaattatacaaaagaaattttatgtcaaaaaataaatttgttaaatttcccgatggatattttcgaaaatgagagtatgataatacaatagataaaataaggaaagggaggcagagtatggattcgattattagtaaactgtcagaagtagaatctgcagcagagttgatcgtgcagcatgcagaggaacagaagcatatacttgatgagcagatgaaggaaaaaacggacaagtttgaccgggaactcgctgcggatacagaaaagaaactaagtgaaatacgtgccggtatgcagggcagtatggacttcgagctggaacggctcagagaagaaagtgcaaaaacgatcaatgcatacaagagagaatatgagttggagcatgagcggtatgcgcaggagattataaaacgtataactgaggtataagacatgggaaatttgcttgtatatagtgggatcactacaaagatacgtgctatgagatcgagactcttgtctgagaaagattttgaggaaatatcagcgctccacaatgtaccagaagtagtcgcttatttgaagaaacactcggcatatgcagatgattttgcccagattgatgagaacaaacttcaccgcggagacgtagagaaaatattagtccagtcactctatgatgattattcaagactgtaccgtttttcgggaatagaagtacggaagtttatgaaactatatctgaagagatatgaggtcgatctgatcaattattgtctgcggattatttttaaccattatgaacagccgtttgatttgaattataagcgaactttttttgacagatattcacagatttctattgaaaaactgattacttccagaacgattgaggagttcgtggacaacttgcagggaactgagtattatgaaccgctcagaaagctcagggattccaatgcatccacactgtttgattatgatctggcactggatctgtattactacacaacgctgtggaaggagaagaaaaaggtcttaaagaaaagagaattagagatctttacaagagatattggttctaagatcgacctcctgaatcttcagtggatctaccgcgcaaagaaatattttaagatgcagccggcagatatttattcgatgatcatcccgattcatttcaagattcatcgggatacggtgaaagagctggtggagactgcttcagtggaggagttcatcgcgcatgttgccagcacatattatgtaaaaagatatgatttcgatgatcatcatacgatagaaagagtctattttgaatgtatccaacggttatatacggtggatgaaagacggaatccatattccattgcttcaattaacacataccttttcttaaaagaagaggagattaagcgattgaccagtacattagaatgtatccgttatggattgacgccgaaagaaacattagattatacagggggtgttatacagaaatgatagtaaagatgaagttcataagtattacaggaccgaaaaatgacatcgaccgtgtaactgaccagtatctttccaaatatgagattcaactggaaaatgcgctttctgagttgaaaactacagagaatcttcagccgtttgtggagatcaatccataccgggaagcattggaaaaggcgaaacagctcgccttgtatgtcaaggatcagaagccggaagatacaccggaactttccattgaggagatattccacacagtgcgcgatgcgaatcatgattacatggaactgcgtgcaaaggaaaatgactggaaggtagagcgggagatgttaagagaacgtctgcttgcacttgcaccgttccgtccgttgaattttaacctgcacaatgttcttcagttccgctatattaagtttcggttcggaagggttccggtggattattaccatcgccttgaaaaatatgtgtacagtgacatggatgcattgttcattgaaggcgggaaagatgacagctatgtgtacggagtgtattttgtagcgaataaggcagccgataagaccgattcgatcttccagtcgctgcattttgaacggatttatctgccggatgaatatcagggaaatacagaggaagcctatcagaagctggagcgagagattgaggagatcacagcaaagattaatgggattgatgacgagatcaagctgacgctggcaaagaaggccggacgtcttttggaggcgagaaaccggcttgagatgctctgtgagaacttcgatgtccgaaaggttgcggcttgtgtagaagatcagcatgaggacttttatattttgtgtggttggatggcggaaaaagatgtggaatctcttctgaaagaagtgaaaaatgatccgaatatttttatttttgtagaggaggataattccggatactttggagcgcctccaactaagcttgagaatccaaagttgtttaagccgtttgagatgtttatcaagatgtatggactgccggcacacaatgagatggatccgacaatcttcgtggcactgacttatacatttatcttcggtgcgatgtttggagatgtaggacagggtctctgtctgttccttggaggagcaatcctttataagtggaagaaactgaaccttgcgggaattgtatctgtcgctggactgttctctacattttttggctggatgttcggaagtattttcggatttgaagatattatcgaggcaaaatggttaagaccaatctcccatatgacgaatcttccatttattggaaagctgaatacagtatttattgtcgcagttgcatttggtatgggaattatcctgttatcgatggtgtttcacattatcaatgctctcagggcacacgatgcggaaaacgcatggtttgatgcgaacggacttgccggacttgtattttacggttctgtgacagcggttcttgtgttgtttatgacagggcataagacaccggcaggaatcgtgatggcagtgatgtttggagtgcctttgattctgatggtattgaaagagcctctggcaaagaaaattgaaaagagcactgagaagatgacagaaggaaaagtgatgttctttgtgcaaggatttttcgaattatttgaaacattactgagttatttctcaaacacattatcgtttgtccgtatcggggcatttgctgtcagccatgcggcgatgatggaagtggtcctgatgcttgcaggcgctgaggcggggacaccgaactggctgatcgttgtactcggtaacctgttcgtatgcggtatggaagggctgatcgtagggatccaggtactccgtcttgagtattatgagatgttcagtcgtttctacaaaggaaatggacgagaatttaaaccatacaaaatcattaagaaacaataggaaaatttcattaggaggctattattatgacattagcaacaaaattaattctgatcgcaactttagtattaagtatcattcttccattcggatattatctgatcggagagaaaaacaagaagcgttataaaagagcaatcggaacaaacgcattcttctattttggagcatttcttgtggcatcgatcatgatgttcggaggaaatgtacaggctgcagaagctgctacttctgcttctatcgcaacaggtcttggatatatcgctgccgctcttgttaccggtttatcatgtatcggtggtggtatcgccgttgccagtgctgctagtgctgctcttggagcaatcagtgaagattctagcgtacttggtaaatcattgatcttcgtaggtcttgcagaaggtgtctgcctgtatggtctgatcatctccttcatgatcttaggtaaattataagccgatgaagatgtatttgatcagtgataatgtagatacctacacagggatgcgtcttgcgggtgtagacggagtcgtcgtgcatgagcgcggcgaactctatgaggcgcttcagaatgtcatcaaagataaggaagtaggaattgtccttctgaccgaaaaattcggacgagaattcccggagatcattgatgatattaaattgaagagaaagatgcctctgctcgtggagatccctgacaggcacggaaccggccgtaagaaggactttatcacatcctatgtaaatgaagccatcgggctgaaactataatgaaacagagggcgatgacatgactttagaagaaaaaattgaaaacttgcaggcagcttcgatggaagaggcgagagcccagggaaatgcaatcatccagaatcacaaagaagcgctggaaaaactttataacgagcatacagagactgcactcagacaggcagaactgaagctgaaggcagagacggcaaatgcaaagcatgaggtcaacaaagccatggcaaaatcccagattgatctgaagcgtgagcagggaaaatgccagacagagttaaagaacagactgttccgcagagtgcatgttcttgtagatgaatacatgcagacagaagcgtacacagaacttctgtcttcttatatccacaaagcaatggcatttgccggcggggaacaggtgacgatttatattaatccgacagatgaagataaaaaagcagaattagaagagcgcacgggagcttccttgaccgtcagcagagaagactttatcggagggatccgggcagtcatccatgcgaagaacattctgatcgatcactcctttaaggcgtcccttgcagaagaatacgagaaattcttgtttttaggagggaaagaaaatgcttagaacgggaaagatttacgggatcaatggtccggttgtttacctgaaaggaaacacgggatttaagatgtcggaaatggtatatgttgggaaggaaagacttgtcggggaagtgatcgcccttgataaagaacggacaacgatccaggtgtttgaggagacgacagggcttcggccgggtgaaacggttgaggcgagtggagatgcgatctctgtcacactggcaccaggaatcttgaacaacatttttgacggaattgaaagaccgttggagcgtatcgctgaaaactccggtgcatatatcagcaggggtgtcagtgtagactcacttgataagacaaaaaaatggagcacacatatgacggtttctgtcggggacgaggttcacggcggacacattatcgcggaagttccggagacggcggcgatcgtgcacaaatgtatggttcctccaaatatcagcggaatgatcacaaaggtagcgccggatggagaatacacgatcgatgagccacttgtgacggtggaattggagagtggaaagacgatcgaccttacgatgacacagaaatggccgattcgtgtgccgagaccgacgcatcacagatttccggcatccaagccgcttgtgaccggacagcgtattctggatacgatgttcccaatcgcgaagggcggaacagcctgtgtgcctggtggatttggtactggaaagacaatgacacagcatcagatcgcaaaatggtcggatgccgacattatcatttatattggatgtggagagcgtggaaacgagatgacacaggtattggaagagtttactcagcttgtggatccaaaatcaggaaatccgttgatggatcgaacaacattgatcgccaatacatccaacatgccggtggctgcccgtgaggcgagtctttacgcaggtctgacacttgcagagtactaccgtgatatgggatatgatgtcgcgatcatggcagattccacttctcgttgggcggaggcgctccgtgagttgtctggacgtctggaggagatgccggcagaagaaggattcccggcttatcttgcatcaagactttctgcattctacgagcgtgccggaatgatgcacaatttaaatggaacagatggttctgtatcgatcatcggtgcggtatctccacagggtggagatttctctgagccagtcacacagaatacaaagagatttgtccgctgcttctggggactggataagagtcttgcatactccagacatttcccggcgatccactggctgacaagttacagtgagtatctgatggatcttgcaccgtggtatgcaaaacatgtctcagataaatttattgattaccggaatcagatgatggcacttctcaatcaggagagcagtctgatggaaatcgtaaaactgatcggaagcgatgtgcttccagatgatcagaagctggtactggagattgcaaaagtgattcgtcttggatttttacagcagaatgcatttcatgcagatgatacatgtgtctctctggagaaacagtttaaaatgatggaggtcatccttcacttatatgataaatcaaaggcattgatcacgatgggaatgccaatctcggtattgaaagaggaagacatctttgagcgtgtcatagcgatcaagtatgatgtcccgaatgataaactggaaatgtttgatgactacatgaaagccatcgatcaattttatgaccgtattatggaaaagaacgcataaggaggctgtgtcatggcaatagaatatttaggactgagtaatatcaacggccctcttatcgtgcttgagggcgtagaaaatgctttctatgaagaaatcgtagagtttgttgtagagggcaatcagaaaaagattggacgtattgttgaaatctacgaggacaaagcggtgatccaggtgtttgaggggacagaaaatatgtccctgactaatacgcatacaaagctgactggacatccgatggaagttgcattgtcaccggatatgctaggacgtacatttaacggtatcggggaaccgatcgatgatctcggaccgatcacttccacactccgcagaaatatcaacggacttccgttaaatccggtaaagagagaatatccgcgtaactacattcgcacaggaatctcagcgattgacggactcaccacactgatccgaggacagaagctgccgattttctccggcaatggacttccgcatgaccagctggcggcacagattgtaaaacaagcgtcgctgggagatgattcggatgaacagtttgcgatcgtatttgcggcgatgggtgtgaaacatgatgttgcagaatttttccgcagaacatttgaagagagcggggttgccgatcacgttgcgatgttcttgaatctcgcaaatgatccggtggtagaacgtctgatcacaccgaaggtagcattgactgtggcagagtatcttgcatttgagaagaacatgcacattcttgttattctcacagacatgacatcttttgcggaggcgatgcgagaagtatcttcttccaaaggagagattccaagtagaaagggattcccgggatatttatacagcgaactggcaacaatctatgagcgcgccggaatcgtggaaggtgtcaacggttctgtgacacagcttccgattctgacaatgccaaacgatgatattacgcatccgatcccagaccttacaggatacattaccgaggggcagattgttctcgatcgaaaccttcatggacagtctgtctatccgccgatcaatatcctcccatctctttcccgtctgatgaaggatggtattggaaaaggatatacgagggaggatcatcaggatcttgcaaatcagctgttctcttcttatgcaaaagtaggagaggcgagaaaccttgcatcggttatcggagaagatgaactttcgccgattgataaaaaatatctcgaattcggtaaggaattcgaggcaagatacatcggacagggtatggaagaaaaccggacgatcgaggagacactggatcttggatgggaactgcttcgtatgcttccaagagaagagcttgaccgaattgacacgaagattctggaacgcttctacgagaagaaggaagcataaaaaaagaaagagaagaagattagaatatctggaaaggagccgagtgtgttatggatccacgtacatttcccacaaaaggaaatctgattcttgcaaaaaattctctggcacttgcgaatcagggatatgagctgatggacaagaaacgaaatattctgatccgtgagctgatggatctgattgatcaggcaaaagagattcaggagaaaattgattcgacattcacatatgcttataaatgtctgcagcgtgcgaacatcgaacatgggatcaatctcgtatctcagattgcctacaccgttccaattgaaaaatcaatccggatcaaaagccgaagtattatgggaacagaaattccattggtcacttatacgccggagatggaggcgcctacttattctttcagtacgacaaaagaatccattgatgtggcgcgtgaggcctttaagcaggtaaaagatctgacaatcaaattgtcgatggtagagaatgctgcgtaccgccttgcgggaaatattaagaagacacagaaacgtgccaatgcattaaagaatatcacaataccgacttatacagcacttgtgtattctatttccaatgcgctggaggaaaaggagagggaagaatttacccgtctgaaagtgatcaagcggatgaaagaataggatcgtttccaaaaaaattttgggaagtccgatttcgttcttgaatatttgaattgaaaatgatagagtatactttagaaaagcagaagaaggtatactgtcatgagaagagtcggaaaagtcagaagtgaatatagagaaaagaagcaggtcgggaaggcctgcttcttttcactttatccggctaaatgattaaagagaaggagtgggaccatgaaagaggcgacaaaagaagagttaaaagaagtcttcagcttaaaaagaattatgtgggtgctgatcggaaatacgatctattcttgcggaattgccgcatttgtattgccgaatgacttgatcacaggaggaacaacaggaattgcgttgatactggaacattatttcggtctgccgatcggattgtctgttgcaatttttaatatagtaatgtttatcctggcaatcttgattctcgggaaatcatttgcgctcacagcgctgatcagtacgttttatttcccgtggatcttatcgcagtttcaaaaagtacagtttattcaaaatatgacagatgattttctgctcggaagtatttttgcaggactgatgctgggacttggagttgggcttgtcatcagagccggagcttccactggaggtatggacatcccaccgctgatcttaaataagaaattcggacttccggtatctattgggctctatgtatttgattttacaattttgatcattcagatgtcctttagagacaaagagcggatcttatacggaattttacttgttctaatttattcaacactggtagacaaagtgcttcttatgggtaagacacagatgcaggtaaagatcatcagcgatcattacgaagagatcaataaagtgatccaggagaaactggacagaggttctaccttcttcaagacggaatctggatatctcagaaaagattcttttgcaatcatgacagtcgtatcgtcaagagaattaccgaagctgaacgaacttgtgcttgagattgataagcaggcatttattgtgatcaatcaggtcaatgaagtcatgggacgagggtttacactgcataaacaggcagagtaattgtccgggaaatagtttgcggacggtcggagattatatggaagaaatgtgatctccgaccacgcaaaaaatatttcaaaaaatttgaaaaaatttaaaaaattgcttgcattctctaaaaaactgttatataatatcacttgtgttaaggaaacacaaaaacaaaataaagaaaatgcgcgattagctcagttggtagagcacctgactcttaatctagagagaaagacagacaaaagcgcattggaagaaaagaggcactgttttcaaagagattggaagcagtttttttgtgtctaaattcagaaagagcaaccttttttctgttcaaatgtaaaagaggcagatggcacaagggaaaaaagctttgacgcaaaatctgtcgcaaatccgtcgcgagagaaataaatagtcttgaagtatatataaagttttggagtggtagaaggtttgataaactttttactgctctttttttgacagataaatgtatattatgtttttgaggtaagaaaagaggtgaaagcaatgtatattaaaatttacacaagaagtcagcttgtactgttaagacagctgaatattctgctgggaaagtatcagataccgggtgagatcttagaagaggcagacaagcttcttgaccggaaaaaactgggaagaagtggatttatagcagtgatgatcgaaccacttacagattcggtggaagaggtaaaaatgttactgaactgctacccaaagagaattgaggtgtctgagcatatccgggggattcctattaagcaggaagggttgtggctgactaaaagaaaggagtggtacagagattgttggaaagtggcgggagagcaaagtaacatttatacgatttatccgataaagttgaggaaatactatgatgaataaaccactgactgctattttgccggaggaatatattcaatcaaatctgttaaatcacattccaacacataacaaagacgcagaagtatatcaatatctaatcgctggactttgttgtcgcggtagtttctaagttgtgtcctctgcatttctgcacgaaaagatagttgattcaaagaaatatctttctcttttagaatcgtgtctaaatgaattttaatttcaccgtaatttttcatatcagcaggtagctgtcgtaagggattttctttttttctgttcattttttgtcctcctgatataattatattttgatagatatgcccttgtaagattcattaaagtatggtatatttatatatgggtagataaatgctcaatataaaggagggaatgactatgccaatacctattgttcaaagtggaccaaataaagggaaagaacgtagccgtaacaaaaacggacagtggaggaagaagagaagcgatgcaggactgctgagaaggtcatccttatcaaaagagatactggagtttttagatatgatagggaaaaagtatgactaaggaaaaggtgagaccatggcatttggaaagaagtcagtagaagttcacacggaaaatcctttgcaggtagaggaagaacgaagagaacgagaaaaggaacaaagaagagaactgttaggagtagttggagaaatactgataaaaacggttcagatattgatgaaataatgtaacccataaataaaacagactataagtatataattcgaataaacctaaaaaaggctggtgtattgtacatcagtcttttttgtgatggagggaaaatgcaatattatattttaggagtagtggtaggtgtaatcctgctgaatgtcttatatgcagatattatattttgggaaaggcaggaaagctatgaaagacgaagataagaagaaaatgatagaaggtattgtgatagttgtgacgatcataaagataatcgtacagcatcggggacaaatcagaaaggggcggtgagatgtatcaggtgattgcaaatgaaagtgagttggagcaatggctgagggtatccgatcaggttggtgtgatagacaagcatatgggtatcaaaaaagagctgcaacaagtagttgccagcatagatagggagtacagtcctgaccgtgatttacagcgtgatttgggcggatatgtggtcattctgtatggggatacagaggaagtaaggaagcattacaagaagattttaaactatcatcatctgaaagaagaggagtatgagtatgaagaagcaggaagaaagtctgagtgtcaggaagcattgacattcagactttatctatgttcctcagattatgcggtgggaatcctgatgatagagaatgaaaaggagaggtaaagatggaaaacacagtaaagcagacggaaatcctggaaaagacgggtgtatttgatgaaaaactggaaaaaagatttgaattaagcctgacctataaggggacaaagggaaagactattcttgtgatagggatcaacccggcttctaaccatgtgaaagtctttgataatactacaaattatctgctgaacaatctcggaatgcttggatattccaaaatcatcgtgtggaatctttttgcaaatatctgtacaaagctaaagccgcaggaaattacagataatacagagaacatgcagtattttgcggaactgttggagagaaagtttgatacggtactgattggatgggggaatacatttttgggcaacaagaatatggagcaggcaaagagacaagtatgtgagcagttacagccgtttgctgaaaaagttatggaaattgtagatgaggagggagtatacgaagagttacatacgatgcacccgctgttttgtggacaacggttcagtgggaagtggaagctcagaccatttatttttccaacagaagagtgatgattccggggcgcaagtgttaagcttgcgccctgataatttaaaattcttcaaaaaagatacaaataagtttgtaaaagttttcacttgggtcttgtgtatcatcatattgtaaatcatttaagcgggatttctgtgaagaagaaagaggatgaatcttatatttagaagctgttttggaagaaagaggggactgcggaacaaaatttttcaaaaaagtaaaaaaacaaattacatcttccggatgaatgatttttcgataagttttcttcgtggaggactgcatcagaggtattttgaagcagtgattgagaaaaagagaataactagagtgaagattggaaagaagggggtcagcctttggggatgagtataatacataagcttttaacatgtaataagaaaatgtagagagttgtttttcgtcagcagggagattgtgataagaaaggtagtctttcagtgcacttagttttcttcgataccatttgtggaaactattataatcgctggaatcataaaaaagtggagtgtccagcagagtcagtagatttccccaggtttctttttcgcatccacggttttcggttttcggtgttgtgttcatagtatgtacgctccttttaatttccttgatttatatagcgattttcagaaagctatataatgaattgttcggagcacaattttttttccaggggaattaagaacaagggagaaaaaacgtccattaaaaagcaaaaggtaatctggtaaagtaagggcaatcaaagaaataaagaaaaggagatgtaagtatgtacgaagcaggtaacatgtattttttagaggcaagacctaacaccgtttcaaaggacagaggaggaaaaggtgcagtgacactgatcaatgcggaaaagaaaggctgtggaagccggatgatcatttcaaaacagttggaaaaagatttgcaactggaagataagattcagattgcattggatgcagatggaagcagtttttttctgagtaagtgtattgatgaaaaagaagctttttactctttgcgtcgtttgaaaaagggtgacagcaacagcaggcttgttttgtatcagaaagcagtgatacaagaactgacagaaaaattggggttaaattttgatgaagctgtttctgtgaccttctatggtgtgaagtattttgaggaagaaggaacccgtgtcgcaagaatctttctggaggaaaaataagtatggcatatgaagttgtagtagaaacgatagagaaagcagaaacgagacctgtatattacaaggaagccggcattgaagacggtcagtacggaaaatataaatgggtggagaagtcaaaggaatggaagtttataaggatgggaggtgcggtatatgtcaaagcagtgattacaaacatagatacacaagaagagagcctgcggttatattttgaccggggaaatcacgagagagttacttttgtgtttccaagacaatccttaaatgagagtaagattgttggactgacagcgatgggagttcaggtaaagaagacacacgcagatactttgatcaagacgatagaaaatcaggagaggaatgcggaaaggatttaccgtcatgagattcttgggatggatgaaatcaatggaagaacggtatttaaaggtgcaacgggaataggagtgcaaagtgaatatcaggggcaggcaaggatttttccgaaaggaagctacgaagaatgggagaaagtagtggaagaagaggtaatggggcagataccgttagagtttttactggcggtatctgtatccggaatgctggtagactgcctgaaagaaaaaatcagcatttccaatgtcatcgttcattgtgtgggtgagagcagtacgggaaaaacaacgggtgcattacttgctgtttcaaccggaagtgcacctgactttctgggaaataactttgtatttacttttcaggacaccttgaacagcctgatgcggtcattgccgaacagctttgtttcggtcattgatgaggggtctttacttggaaacagagatatgacaaatgtattgtacagtctgagcagtggagtggaaaaaagaagactgacacagtccatgagcgtgcaggaatcagcacgcttccggacggcattgattctcacatctgaaaagtcaatcctttcccagtgtaataacaattcaggactgcttgtcagaaatttcgagttccaaaatgtggagtggacaaaggatgcacagtcggcagaccggatcaaatcggtcattagcatgaactatgggcatattgttccgaaagttgctgagagactgcttcagttaggagaggaaaaaatcatagaaatgttgtcagaagaggtggaaacgattgtagaacatgcaaggaagacagagatatataacaatcttacagagcgtactgcaaaacagtcggcactgattcttgtagcggtggacatcttaagtgaagtgatgggactgacttttcataaagaagaaatcaggaatttcatggaggaacattcactgataaaggatacggaacaagtctcgctaggcaaacgggcaatggagtggctgttgcagtacatttccaaaaacagaacacagtttttggatgaacgtgtcagggatggggttggaggatgcaggggaagaatccaaaagacaaaagaagtcctgctgagtaccggagaaatctcagacctgaggctgtatatagcggactccgaatttgtagagattttaagggagggaaaattcagtgaaaaagctaccgtcttaaaagagtggaaagagatgggatacctgaaggcacagcgagaccgctatgtaagcaacattaaaattttacaagacatcagtgtaaaaggttatattgtattacttccggtatctatgaaagaccagtgggaagaagtagaagatataacagaaataccatttgaagattaggaggaaataagatgggaaagacagtttcaggaagtgtaagaccaagaccgaatacgaaggatgtaagatattttgacatcattttagagctgggaaaggatccgctgacggggaagcgaaagagagtatactacaaggcagatacaacagacagacaagaagcagagaacctgcttacagtaaagaaagcagaatatttgtcgggtaacatgatagaaccatccagacagacggttgcttcctttttagatgaatatttaagagactatgttcaggtacagagcagtcctgcaacggtaaaagattaccggaatgtagtggagaattatctgaaaccggagtttggacagataaaactgcaggacttaagcagggcgagggtgcagcaggtgtacaatggatggaggctgaaatcaacaaaaagcgataagccgctgagagcaacaacgatcctgcatatcaacagagtatttaaagccgctttaaatgttgcatgtgagctggaatatatcaaagagaatccggcaagaaaagtaaaggtaggaaaagatatggtaacagaacatgtagatgtatacactgtggaggagattaaagaattacaaaaagcagtgaaaggtacagatatggaacttccggtagcactactgtttgactgtattttgagaagaggggaactgcttggtctgaggtattctgatattgattttgagaagaataccgtcacggtgcagtacacatggacagaaacagatggaaatgaacctaccttaaaggattgtaagacagagagttcttaccggaagatggttgtaagtgaacacaccatgaagctgttgaaaaagcaaagactgctgtacatgcagaacagaatgaaatacggggaaaacttctgtaacagtgaccgtgtaatctgtaaagagaatggagaaccgtatctgcctaaaagcttcacacataagtggagaaaaacactgagccgtcatggactgagacatattaaactgcatgggacaagacatagtgcgatttccctgctgatttcagaaggagtacccgttcacatggtacagcagagagcaggacacagagatcctaagattacattgggagtatactcacatgtagcaaaagacagacagaacatagtagcagaaaaactggatacgcttttgttttcagcagtgaatgaataaacgtgtacacctgatttccattcaggtgttcaggaatcagaggtttgtgactcaggctttgcagttgcgagggagaaaatcccgttttcccgtcccgtgcaaagccgagtacacaaaaaaacaatgtcagatacttcaatcttgtttttgaggggcgggaaacacgggattgacgagtgagcaacgaagcaaagcggttaagctttgctgaggatggaaaggttattgctatggaatcaagatgatttgtagcagttggtcgcggatttggtcgcgaggtacgaaaaaacgaagaaattcaaaaaatttgaaaaaattgcttgcattctcgaaagaactgttatataatagttcttgtgttaagggaacactaaaacaaaataacgaaaatgcgcgattagctcagttggtagagcacctgactcttaatcagggtgtccagggttcgaacccctgatcgcgcagttaggaagcactgtttttgcaatctttgaattgtgggggcggtgcttcttttcgatatttttcatagatttttaagaaatttctcaacattttagaatgcagttatgatataatgctgaacagtggagtgaaaggagacggaaatgttcggatatgtgacggcatataagccggagatgaagatgaaagatttttataaatataaggcatactactgtggactgtgtcatgtgctggaagaacgacatggactcagaggtcaggttacactcacatatgatatgacatttcttgtgacgctgctcacttccttgtatgagccaaagacggttcatgagaagcatcggtgtatggtgcatccgctaaaagagcatgacatgcttttcaatgagattacagaatatgcagcggatatgaacattgtgctgacgtattaccattttctagatgactggaaggatgagaagagcaagacggcgcttgtaggacttcatacttaccggaaattataccggcaggtagaagagaagtatccggagaaatgcagagtgatccggaaatgccttgcaaagcttcagaattatgagaaggcgggcgagacggatatcgatgcggtttcaggctgttttgggaaattgatgggagaacttttcttatttcgaaaagatgtctggtcgaagaatctctggaagatggggttttatcttggaaaatttatttatattttagatgcctatgacgacttggagaaagaccgggcgcagggcagttataatccgcttttgaagatggcagacgaagaaggatatgaggagagatgcaggcagatgctcacgatgatccttgcagagtgcagcaactgttttgaaatgttgccatgtgtggaaaacatagatattctgcgaaatattctgtacgttggcgtttggaataagtttgaggaaaagtctgcggccgaggacacggcaggaaagagtagattagagaaagaaataaaaggagaagacagaggagaattatgattacagatccatacagtgtgctgggagtgccgtcgagcgcttctgacgatgaagtaaagaaagcgtacagagaactgatccggaagtatcatccggattcctatgtgaacaatccgctttctgatctggcggaggagaagtttaaagaagtgcaggaagcttatgaccagattatgaagcagagggagaatggagggtattctggaggctatgcgggaaattattccggagggtattctagtggtcaatcttattcttccggcagtgaggatgatgcgaagatgcaggcggcatgcaattatatcaatgcaagacattaccgggaagctttaaatgtactgtcaagcatgtcgaatcagaatgcgcgctggtattattgtagtgcgattgccaactatggtgtgggaaataatcttgtggcaatggagcatgcgcagcgtgcagcatcgatggagccgggcaatccggaatatacaaatctagtcaatcagttccagtggaggggacagcgttatcagaataccggatatggttatggcagaccgacatttggaactggaaatatgtgttgtgatctgtggtgtgcggatcagatgtgtgaatgtatgggaggcgatctttgctcatgcatgtaaatgcaagaaaaatagcattgtcaggggtactggctgcatttgcagtcgtgctgatcgtgctggggagcatatttgaaacaagtaccctgtttctgctggcggcagcggcattttgtgttggaatagtggtcagagagtgggggattgcttacggcgcagcatttcttacggcatgtactctgcttggtgtgatcgtttctccgcagaagatgtactgtgtgacatttgcggcaatgggaatctatcttctgcttgcggaggccggatgggaagcgcttgcgaaagcagaacgtattcagaagaaaaagataattttgtgggtgtggaaatatctcgtatttaatagtatgtttcttccggcattgtattttttcccatccttactggttgcgaagaagatgacgaagacattgtttttcgttatggcagcagcaggacaggccggtattttcatttttgacagagcatacatttattttcaggcagaagtatggggcaggcttagaggaaaggtaatgaaacagtaagggaagccggtgaggagctttgtttacagaggttcccatgaaaagttttcggcacgattctttaaaaaaacgaaaaaacatggtataataaaaatgttacaggaaaatcagcaggaaaaggaaaaaattatgtggatagatgatgaagcactggcgaggaaagacaggaatcagaagcgcaagtttgaaatgctgaagaagattgcgattactctcgcagggatcgcacttgtggcagggctcgcagcaggaggagctgtcggtattttcgttggaaagaggacagaagcaaaagcagttgatgccaaagttgcgaaggcagtcaaagaaagtgaagccaaagcggcaaagcagagttcggataagaaagagaaggacactgtcgatgaagagaagaaaaaagagtggaatttgacattggtgaataatacacatccgctggatgaaaattatcaaccagaacttgcggaagtggagaatggttatacatttgatgcaagagcagcagagtcgctcaaggagatgcttgcagcggccagagaagcgggacttagtcctcagatttgctcggcatatcgtacgatcgaggagcagaaggcaatctataatcagacgatgcaggagtggatcgatcagggaatgacctatctggaggcatttgaggagacaggaaagtcggtggcatacccgggaacgagtgaacatgagctgggacttgctgcggatattgtatcttcttcttacgggatgctggatgaagctcaggcagacaccgaagaggcaaaatggctggaagagaactgctataagtatggatttattttaagatatccaccggataagatttcggagacagggatcatttatgaatcgtggcattaccggtatgtcggaaaagaagatgcaaagaagatcatggacagtggtgtgacactggaagaatatctgggagaaacttattaagaatcgtttccaaggggaaatgtctgcaatggcagagagaaaaaattcgcatgcagacagaaaataggcagtaaaaataggcatagaaacttgtataggcaggcagtataaggggaaactacacttatactgctgctttttttgaagaggaagtcataaagaatttacgttctgttctctttaccttttttctattgtctgataaaatagaacccaaagaattggcgatagatttcatatccttaaattttttagaaaagaagcgagtgtgaacaaagtgaaaatagaggtaatcgatacgcaaaaagaagaccggacggaaaacctgcaaaagaagctcagcggtaagacgatgttggagaggagatatgagcaggaattgatgaaggtgaaagcggcggcagacgcagaactggaagaccgtgacaaaggagaagtgaacccgtatacaggcagagaatatgatacaaatacagtccgggtacacgcagataagattggatatgtgcaggtgtatgaccgcagtatccatgggtgggagaccatgacggaatgggcatttcttgggaaggaagaacagaagaaagtgacgctgggggatgcctatgaaccaccagtattcgtgtaatccggcaagagaagaggaaaaggagcaaatatggaaagttacaaagagtttttaaaaagtgaagtacaagaatttagaaaagcaggacacagatttttggagaaggagatcagcaaggcagaatttaaaggtatttccggtgggatgggtgtatatgcgcagcaggatcagaagtcctttatgatccgtctgcggacaccgtcgggattgatttccaaggaacatttaaatctgattctttcttatgtgcacaagtatggtctggagaaagtacatttgacgacgagacaggcagtgcagcttcatgatctggatattgacagtgtatgcgatattatggaagatgggatcaatcatgatctgtttacaagaggaggcggcggtaattttccgcggaatgtctccttgtctccgcttgcgggagtggaaaaagcagaggcatttgatgtgacaccgtatgcgctgcaggttggaaactatttccttggaaatgctccttcatataagcttccgagaaaattgaaggtggcattctcttcggatgagaaagatacggcggctgcttctatcaatgatatgggatttatggcagtgtctgagaaggggattccgatgttccgcatgtggcttgccggtgggatgggacaaggtccggcagtagcagttccttacccgtcactggtccgtccacaggaagtgctgtattacgttgaggcgatgatccagctgtttattgcagaaggggattatgagaataaggcgaaggcacgtacgcgttttattccgagaagaatggggacagaggcgttcttagaatgttttgagaaacatctggaagaagtgaaaaaaacacatcagttcgaggagattgcgccggttgcggcagaaggaatgtcttcttgtgaagacttgaatggtacttgcatcgcacagcgtcaggaaggtctttatacagtgatacttcacccggtatgtggtcagcttgcggcgcaagatcttgagaagatcgcagcatttgtggagcgagtggaagcggctcagattagactgagcatggaagaagagatgtatgtccgcaacttgacacgggagcaggcggaagagcttcaggcgatgatggcgcatatgatgcagacaccggttgcacgtacactgagttgtgtcggaactccatcttgccaaatgggaattttgcagagccagaagctttgcaggggaatccttgcggcagtgaaagaagccggactttgcgaaagccggctgccaatgattcagatcagtggatgtccgaacagctgtgcaaggcatcaggtggcagagattggatttgcgggaagaaaagtaaaagtcggagatcggtcggaagatgcgttccagcttttcgtgggcggttctgtttccggagcagatacacatatgggagaacttcagggagtaatgcttgcaagtgagattccgcaatacattgtagaattaggaaagcttttggagcgggaaaagaagactgtgacagagatcgcagagtgtgagtgctttaaagaactgacagagaaatttttagtttcatagaaggacagagcgtgtttgaaggtgcagagaagctgaagttcagacacgctctggttcttttttccctggcttgtgcatagattaagaaaaagacaagttgagggatgttgcggaaatatgggacagcaaatctgttatttatatgaatataaagaatctgtaccagtgagaaatgttggctttatacgggcagagcagaaaagagacggagctgtttttagcatcagtgcgaaaggaatcgtggaacatgcaaatgagaaattggagatttttggattttgcatgaaacatggaagttgtgaaacagtctctcttggggagcttccgatcgtgcatgggagtgtatcgcagatggtggagacagaggaacggctggatggtctggatgggattttgatcaagtgtgaagagaaggttctctacgcggcggtatgggagccggtaaaagtaaattttaccggatgcgtcagaagagaaagccaaaaagaagagatagcagaaaagccaagtgaagaaaatgacgcagaggcggaagaaagctttgcggaagaaagtgtgctggaacaggagattgccccggagcagtgtgcgtgtacagggggacagacagacgatgaggagtgcggtggaaaggaacgtctgcaatgcaggaaaattcggagaaatgatctgggggaacttgcgcgcggagagtggaagctggcgaacaacagttttttgctgcatggttactacaactatcatcatctgcttctgatcgaggagggggatgactgcatacttggtgtgccggggatttatcaccggagagagcggcaggcggcagagtgctttggttttttggaatttcgggaagcagaaggattgccggtcacactttctgagcaagagcgaaatgattataagagatttggatattggtgcagaaaagtagaaaaaggacagtagaaagagagcagaggaaacaggaagatgaatcaggatgaaaagtacatgaaagaggcaattcggcaggcgaagaaggcatatgcgctgaaagaagtgcctattggctgtgtgatcgtatatcaggataaaattattgcaagaggatataaccggaggacgattgacaagaatacgcttgcccacgcggagctgatcgcaatcaggaaggcgagcaggaagatggatgactggaggctggaggattgtactatgtatgttacgttggagccatgtcagatgtgttcgggagcgatcgtgcagtcgaggatgaagaaagttgttgtcggatgtatgaatccaaaagcgggatgtgcagggtcgatttttaatctgctgcaagtaccgcagttcaatcatcaagtagaactggagattggagtgttggaggaggagtgcagtcagttgatgaaatctttctttcgggagctgagagaagaaaaggcgagaaagaaagcggaggaaaactccgtggaataagagggcgatttgtggaaaagaaagcaaaaaaacagaaggtacgtggataactttccagtgccttctgttttttaaaaattataatgcgagtgagcccattggatcccaaggttcgaggaggatcggttcagattcatattctttgacaaattgttccggaaggtattttttattgacaacaacctggtacatatattcgtcaaaccatgcatcactcatgacatagtagcctttcttaccggatttttctccccaactgttctcgacacgccagcgatctgggtttccgttctcgtccagattgacacccataaatgtcattgcgtgtgtcataaggctctcatgatagtccagacgctcggcttttgtcatatggtaggtggtaccgagaagttcttccgtctgatagaggtcaagatccatcacaccgttctcgccgcaggaatattttccgacatcacagccgaaccataccggggaaccgtcctgcatctgtgcgattgcggctttctttaactcttcaatttccaggtttaggtagcgcaccgggcgtccttctttgacatttccaagatatttgacgctgtagctgcggtggtatggtttgtcgctggttggagcattgatcaggctaatatagtcatcgagattcagaccgatgtacttttcgtaaaattgctgcggagtgatctgtgtatcgcgatggaagttcttatctttgtcgcgcacttcaaaatcgaatgtcttcggaggttcaccgagacagatgcagagaatgcggtagatttcattcatcatagattctttctgcatgcgaagttcatcgatagaagccccggattcgttcgctttgcggagggtgcaggcaaattcacgaagtttttttgtcatatatcctgccatttcgcgtgttgcagaagagcaggctgtctccggcatcgcatccttcgggacgagaccgtatttgcggataatgctgcacaacatatcccattgaccaccgtctccgagcgggtctgtaagaaggtgggagatcagtcttccatttacaggttccttaagtgtgtcaagaatgctttctaagaaataatttgctttctcaagtttgtcgtagaataaagtataattctgtgacagctcaaatgtctcgagattcagttttttcatgacttcaaagcggaatgtgttgagtgcggcgaacatccagcagcgtccactctgcatctgattggtaatctctccttgttcaagggagatggaaaattcgtgtcttgtgctgcgggctgcctcgctgtttctggatgattttaagagtccatttacagtgacggcatttttcgcaacagtgtgaagtgtgtttgcgcggaaatcattctgaaatgcttccagtgtttcttttgtgagtgattccttcatttgataaccttctttctgctcattcgttgtgttaaagattttgtctatctgtattttaccaccggagaaatctagtgtaaatgaggaaataaaaaaacggtgagcatctgaaagacactcaccgcaagtaagtccatattttttcgtgcgttacacttcgaacttacctcccgaacgttacctcggtagttaactcagcccaggcacccttacggcacccggaggtctctgcttagtgctgcttcgttcccgacctgacacggttcacagagttccgtcgcgtaagacccaagcctcaacgccactttccgagggcagcttcacaagcataagccctccgtgtaacatcacccccactatagcggattgtgggtacaaggtaccgctaacaccccggctgcacgagtctatattttaccttgtttatgtgaaaatgtcaactgggaattgcgaaaaagtacaatatatagtaaaataaaacaatatttcaggcgcagatttgccgcaaggtacagttggcgcagaaaagaggcgtatatgaacattttattaacagcgatcaatgcgaaatacatccattccaatctggccgtgtacagtcttcgggcgtatgtgccggaatatcgggaagagatacaaattgcggagtatacgatcaaccagcaggtagataatattttgatggatctgtaccggaagaaaccggatattctttgcttttcctgttatatctggaatctggattatgtagagcagcttgtgagggaggcaggaaagattcttccaggagtgccaatctggatcggaggccccgaagtatcttatgacagtccggcagttcttcagagacttccggaagtattcggagtgatgaagggagaaggggaagagacgttccgggagttggtacattactatatggaaggtggaagtctggagaagattgacgggatcacttaccggggagaaaaagggcagattctggacaatccatggcgcccggtaatggatctgagcaaagtcccatttgtctaccatgacatgaaagattttcagaataagattgtttactatgagacaagcagaggatgtccgttttcctgtagttactgcctttcttcagtagacaagtgcctgcgtttccgtgatttagagctcgtgaagaaggaattacagtttttccttgatgaaaaagtgccgcaggtgaaatttgtagaccggacgtttaactgtaagcacggacatgcgatggagatttggagatatttgattgagcatgacaatgggattacgaattttcattttgaagtgtcggctgatctcctgaatgaggaggaactttctttgatcagtcagatgcgaccgggactgatccagctggagatcggcgtacagtctaccaatgcgaggacgatccgggagatccgccggacgatgaaatttgaagaggtggcacgcatcgtcagacagatcaatgcttacggaaatgtccatcagcatttggatctgatcgcggggcttccgtatgaagattacgagagcttccgaaaatctttcaacgatgtctatgcgcttgcaccggaacagttacagctaggttttctgaaagtgctgaaaggctcctatatggaggaacagaaggaacagtatgggcttgtgtataagagcagaccaccgtatgaagtgctttacacaaagtggcttccttacagcgatgtgcttcgcctgaagagggtggaagagatggtagaagtttactataacagcagacagttttcgtacacacttggggcgcttgaaaaggcatttccggattccttttcgatgtatgagcagttgggcgcatattatgatgaagagggacagacctttttaagtcacgcgagggtgacacggtatgagattctgtatgcatttgcgaagaagatagatccggagagggaagaattgtatcgggaactgcttatttttgatttttatctcagggaaaatgcaaaaagccgaccggcatttgcgggagaagagacagtgaaaaaagaagagcagcagcaattttatgatgaagaagcaaaagcacataagtatcttgcaggatatgaaaaatgggacaaacgacagttgcggaagatgacacatatcgaacggttttgctatcgagtgaccgaagatgctgccagaggagagacggtacttttatttgattatcagaatcggaatccactgaactatgaggcacgtgtggtagaagtttgtgagatggaagaagaaacagtattttagaaaaagattcgggaaaatccgcttttggtttcttgcaaaacaggaagaaacggtatagaatgaagaaatatcttccggcaggaagggaagaaatgtgcaatagtagttggtggaagaaaggaagaagaacaatgaatttttataataagaaatttcgaaagattgcatcggtgatcattatcgtaattattgtagcaatgattctgaccggagttgtgccatatttgttctaatcatataggagcagagaacagatgatgggcagaacaaaagaaaggactgggaaagcatgaaaatagggaatgtgtcaggaactgtgctgaagcgttctattttaaaacaattacatactgtcagagatgagtcgatgtttgaaccgacttctgaggaaatgtgtgcggggattcgcgtaaaagagtcggctccggtgattttttccgggacttcggtgtatggaagtgcgaaaagtatcggcatatttgcgatggcgcgagcggtaaatgatatcgctgcccgaggtgcagatccaatcggtgtggatgtgcagatccagcttccgccttatgcatacgaatccagattgaaggcgatggtagaatggatggagcaggcggcagagaggcagaatcttcagattctctgtgctaaggcagaagtaagtcccgccatctgcgaggcgattgtgcatgtcaatgcagttggaacggcggaagaagagattcatcaaaagatggtagcagaagcagggcaggatattgtgcttgcaggatggatcgggcttgagggaatgctgcgggttgcaggcaggaaagaagaagagctggcgaagagatttgttccggcatttttaaatcgaatcaaagggatggagcaggaattgtttgcgctggaacagatctggactgccagagagcatggcgcttcggcaatctatcagatcggtccgggaggaattctggcgacactgtgggaagcagccgaggcagctgatgtagggctggaagcagatatgaagaagatgtctattcagcaggaaacagtagaaatctgcgaatatttccgcttgaatccgtatcagatgacgtcagtgggaagtcttctgatctttatacagaatggagaggcgcttgtgcagaaacttcaggaggcaggaaagcaggcagcggtcatcggacatacgacgaacaggaaggagcgcgtgttgtctgggggaagcgagcggcgttttctggacagacctcagccggatgagcttgcaaggatctatgagtcatttatcgaacaggacaggaaagaagggaaagtataatgagaagagagattttaaaatatcttgaaaggaacagcaaaataaatctgcaggagttagcagtactgctcggctcagatgaggtgatgattgcaaatgagatcgcgcagatggagaaagagaagatcatctgtggctaccatacgctgatcgactgggagaagaccggtgaggagcaggtggttgctttgatcgaggtaaaagtgacaccacagagaaatcagggatttgacaggattgcagagagaatttacaactatccggaagtcaatgcggtgtatctgatctcggggggatatgattttctgatcacattgaaggcaaggactttaaaagaagtgtctgaatttgtgtcaggaaaactggcgccgctggatgccgtgctgagcacagcgacccatttcgtattgaagaagtacaaagatcatggagcagtacttgtggcaaagacagaatcagaaaggatgttggtgacaccgtaatgaggaatccgttagcaaaaaaagtagtagaaatagagccttcgggaatccgtaagttttttgatgtcgtcaatgagatgaaagatgccatttctcttggagttggggagccggattttgacacgccttggcggatccgggaggaaggaatttattctctggaaaagggaaggacattttatacatcaaactctggactgaaggaattaaaagaagaaatttgtaattatattcagagaaaaacatctgtcgtatacgatccaaagtcagaggtagtcgtgacagtcggcgggagcgagggaattgatatcgcaatgcgtgcaatgctcgatccaggtgatgaagtgctgatcccacagccaagttatgtatcgtatcttccgtgtgcggtacttgcaggcggtgtgccggttgtgatccctcttcaaaataaaaatgagtttaagttgacaagagaggagttggaggcggcaataacacctcgcacaaagattcttgtcctgccatttccaaataatccaacggggtcgatcatgacaagggaggatctggaaccgatcgcagaagtagtaaaagagcatgatctgtttgtgatttcggatgaaatttactcagaattgagctaccagggagagcacgtatcgatcgcagagtttccggggcttcgggagcggacgatcatgatcaatggattttccaaagggtttgcgatgacaggatggcggcttgggtatgcgtgtggtccggcggagattattgagcagatgattaagatccatcagtttgcgattatgtgtgcgccgacaaacagccagtatgcagcgatcgaaggacttagaaactgtcagccggaagttgatgagatgcgggaagcttacaatcagagaagaagatttctcatgcatgagttcagaaggatcgggctgaaatgttttgagccgtacggagcattttatgtgttcccggatgtttccgagtttggaatgacatcagaagaattcgccacgagatttctcgaggaagagcgggtggcggttgtgccggggactgccttcggggcaagtggagaaggatttatccgtatttcttacgcatattctctggaagatctgaaggtggcgcttggaaggctggaaagatttattgaacgtctgagggagcaaaagagataaaggaggcagaaaaaatgttaaatatcgtgttatttgagccggagatcccggcgaatacaggaaacatcgggaggacgtgtgtggcaacaaacacacgcctgcatctgatcgaaccgcttggattccgactaaatgaaaaagcgatcaaacgggccggtatggattactgggaccagctggatgtgacaacctatattgactacaatgattttctggagaaaaatccgggggcaaagatctatatggcgacgacaaaggcgccaaatgtctatacggatgtaaagtatgagccggattgttatatcatgttcgggaaggagagcgcagggatcccggaggagattttagtccaccataaagaagacagtatccgtattccgatggtaggggatatccgctcactgaaccttggaaattctgtggcgattgtactttatgaggcacttcgtcagaatcagttcgcaggaatgaatttagaggggcatttacaccggttagaatgggatatataatcataggaagattcactaaaattatagacagaattaataaagaaactgtaaaaaacctagacaagaaccctaaaaatgttataataaaaaggacaggaaaatatgaattgaaagtagggatcgagttatgaagtataaaagaagtgtgtatcgtacatttgcacttattacacagcttggattaagtatgatcacccctatttttttgtgcgtttttcttgcggtgtttttggaaaaaaagttctccatttcactgtttatcccattggtgatcatgggtgtgctggccggaggacgcaacacatattacttggcaaaacatgcaaatgaagatccagaagagaaagaggaacatcaagatgaatagtgcagacaatacagtgaaggaactggcggctggcataattgtatatggaattctggcacagatcatctgtctggtcgtgacggataatacgttgtctgttgcggttggtctctggatcggaattgcaacggcactcggtatgatgatacatatgaagcggtcgatcgaggatgctcttgactttggggaagagggtgcaccgaagcatatgcgtaagacatatgtgatccgtctttttgttgttgcagtcgtatttggagtgacagcttactttcaggtaggcaatatcattgcggcgctgatcggcgttatgagtctgaagatctcggcgtatctccagccgtggacgcacagagtatttgtaagactccaaaaatctaagtaaaggagggtgatcatgtgggaactggcttaggaattttagctgcagacggacctgattttatgatacacgggcttgtcaaatttcacttgtttgggcaggaactgtggctgacaacgacacatgtcagtgtactggttgtgtgcgtacttcttatcatttttgcactcattgtccgcagtaagctccgggataccgaaggggaacctggaacattgcagaacattgcagagatggttgtggaagcgctggacggcatggtaaaaggcagcatggggaaaaatggaatcccttaccggaattatatcggaacgctgtttttattcctgatcgtcagcaacctgtcagggcttcttggacttcgtccaccgacagcggattacggtgtaacacttccacttggtgtgataacgtttatactgatccagtataataacattcgttacaacaaggtcggagcattcaccggattgtttaaaccgctgccaattttattcccgatcaacttgatcggtgagatcgcggtaccgttctcgctttcattgcgtctgttcggaaacgttgtatccggaacagttatcatgggtcttttatatggcctgttatcgaagttcgcaatcggatggccaggtatcttgcacatatactttgacatcttctcaggatgtattcaaacatatgtgttctgtatgctgtcaatggtatttatcaatgataaattaccggaagcagaataatcagcctcttagcaggcagggaaattttacgaaaatgaattgtaaaacaggaggaatttattatgagtcaaattacaaacgaagcattaatcttagcgtgttcagcaatcggtgcaggtcttgcgatgatcgcaggtatcggacctggtattggacagggtgttgcagcaggtcatggtgcatctgcagttggtagaaacccgggagcaaaatcagacatcacatccacaatgcttttaggacaggccgtagcagagacaacaggtctttatggtcttgttatcgcgctgatcttattattcgctaacccattattaggtcagttataaaaaagagattccgtacagaagcagattgaaaaacggaagagatgaaaataatagaaggaaggaggctgaaccttggaacgtttatttaacctggatgcacaactgctgttcgatgcgtgtacacttgcgattgcgatgttcgtacttttcacactgttgtcctacctgttatttgaaccggtcagaaagatgcttgatgagcgtaagagacgggtaaaggaagaacaggatactgcaaagaaagagagagcagatgctgtcgtattcaaagaagaatatgagacaaagttaaaagaagtggacaaagaagcgcaggtcatcctgagcgaagcccgcaagaaagcgatgaagacagagtcacagattgttgcagaagcgaaagaagaggcagcccgtattatagcgcgtgcaaacgcagaggttgaattagagaagaaacgtgcattggatgagatgaagcaggagatggtagcaattgcttctcttatggcaggaaaagtcgtaaaggcttcgatcgatacaaatgtacaggaaagtctaatcgatgaaacattaaaagaaatgggtgaacgtacatggctaagttagtttctaaaacatatggtgatgcattgtttgccgttgctgttgaggagaacaagatggatctgttcttcacagaggttcaggatgtgctggaagttttacgcacaaacgaagaactgagcagattaatgaatcatccgaagatcatcaaagaagataaagtgaagatcatcgaagaaacattcggcggtcatgtatcccgcgagatcattggactgatgacattattgatcacaaaaggtcattacccggatacagtgtccgtatttgaatactttatcggacttgtaaaggaagaaaagaagatcggtatcgcaaatgtgacgacagcttttgcgctgagcgacaaacagaaaagtgatatcgagaaacgtctgcttgagacaacacagtatgagacatttgagatgaattacgatgttgatgaaagtctgatcggaggcatggtgatccgtatcaaagaccgtgttgtggacagcagtattaagacgaagctctatgaattatcaaaacagttgagaaagatccagattcactagagcgcaaaaaatagaaggaaggtggattcgctccatgaatttaaaaccagaagaaatcagctctgtcattaaagaacagattaaaagatatgcatcagagttagaagtatctgatgttggaacggttattcaggtagccgatggtatcgcgcgtatccacggactggaaaatgcaatgcagggagaattgttagagttccctggagaagtatatggtatggtattgaaccttgaagaagacaacgttggtgcggttctcttaggtgataacagaaacatcaacgaaggtgatactgtaaagacaacaggccgtgtagtagaagtgccggtcggtgattgcatgttaggccgtgtagtaaacgcgttaggtcagccaatcgatggaaaaggaccgattcaggcaacatctttccgccagatcgaaagagttgcttccggagttatctctcgtaaatccgtagatactccattacagacaggtatcaaagcgatcgactccatggtgccgatcggaagaggacagcgtgagttgatcatcggtgacagacagaccggtaagacagcgattgcagtcgacacaattatcaatcagaaaggtcagggcgtaaaatgtatctacgttgcgatcggacagaaagcatctactgttgcaaatatcgttcagacttttgaagaacatggtgcaatggattatacaacagtcgttgcatctacagcaagtgagctggcacctcttcagtacatcgcaccatatgcaggatgtgcgatcggtgaagaatggatggaaaatggagaggacgttctcgtagtatacgatgatttgtccaaacatgcgacagcttaccgtacactctccttactgctccgtcgtccaccaggacgtgaggcttatccgggagatgtattctatctgcactctagattgttagagagagcagcaagattatctgacaaattaggcggaggttctctgacagcacttccgatcattgagacacaggcaggtgacgtatctgcatacatccctacaaatgttatctctatcacagatggtcagatcttcctcgagacagagatgttcaatgctggtttcagaccggcgatcaacccgggtatttccgtatcccgtgttggaggttctgcacagatcaaagcgatgaaaaagatcgcaggaccgatccgtatcgaccttgcacagtatcgtgagcttgcttctttcgcacagttcggttctgagcttgatgcagatacgacagaacgtcttgcacagggtgcccgcatcaaagagatgttaaagcagccacagtatcagccaatgccggtagaataccaggttatcatcatttatgcggcaacacagaaacatctgctggatattccggtagaagatgtgcttcgttttgaaaaaggactgtttgaatttattcagacaaaatatccggaaattccagaagcaatccgtacagaaaaagtaatttctgacaagacagaagaagcacttgtaaaagcaatcaatgaatttaaagcagaattttagtgcggtagcgattaccattcaggtgagaggagaactatatcatggcatcaatgagagagattaaaagacgtcgaagcagtgtgcagagtacacagcagattacaaaagccatgaaacttatttctactgtaaagctgcaaaaagcaagaacccgcgcggaaaattcaaaagcatatttcgaatgcatgtatgcgacggtgacttccatgcttgcaaaagcaggaaacattgagcatccatacttgcagaagagcgactctaagaaagtcggaatcgtagttgtgacatcaaacagaggtcttgcaggcggatacaattctaatatcgtgaaactgattactggaagtggaatcgagaaagaaaatatccgtctgtatacggtcggacataaaggtgcagaagcattggagagaaagggatatgagatcgtggaagatttctctgacgtgatcgaagaaccttcttacagtgatgcacaggcgatcagcaaaagacttctgactgattttgcggcaggggagatcggtgagatctatgtggcatacacattcttcaagaatactgtaagtcatattccgacacttacaaaattacttccggtagacaccgctgcaatcgcagaggaggaaaaagagggagaaagttctgtggacaaactgacactgatgaactttgagcctgaggaggaagtggcagtcggactgcttgttccaaaatatatgacaagcattctctacggagcctttgtagaggccgttgcaagtgaaaatggtgcgcgtatgcaggcgatggattctgcgacaaacaacgcagaagagatcatcgaagacctggcattgaaatataacagagcccgtcagggtgcgatcactcaggaactgactgagatcatcgcgggtgcagaggcattgtagtattggaaaacagattaggagtgaaaagatggcagagagaaatataggtaaaatcactcagatcatcggcgcggtattggacgtaaaatacgccgagggccagcttcctgagattaacgaagcgattgagatcacaagatccaatggcgaaaagttagttgtagaagttgcgcagcatctgggagatgatacagtaagatgtatcgccatgggtccgacagacggacttgtgcgcggaatggatgcggttgcgacaggtgcgccgatcacagtaccggttggagaacatacattaggacgtatcttcaacgtacttggagaagcaatcgatgagaaaccggctccgacagacgtggaatatgaaccgattcatagaaaagcgcctacattcgaggagcaggcaaccgaagcagaaatgctggaaactggtatcaaagtaatcgatttactttgtccatatcagaaaggtggtaagatcggactgttcggtggtgccggtgtaggtaaaacagtattgatccaggaacttatcacaaacattgcaacagagcatggtggatattctgtatttacaggtgtaggagagagaacccgtgaaggaaatgacctctactacgaaatgacagaatcaggagttatcaataagacagccatggtattcggacagatgaatgagccacctggagctcgtatgagagttggtctgacaggtctgacaatggcagagtatttccgtgacaaaggtggaaaggacgtacttctgtttatcgataacatcttccgtttcacacaggcaggttcagaggtatcagcgcttcttggacgtatgccttcagccgtaggttaccagcctacacttcagacagagatgggagctcttcaggaacgtatcacatctacaaagaacggttctatcacatccgttcaggctgtatacgtacctgccgatgacttgactgacccggctccggctacgacattcgcccatctggatgcgaaagtcgtactttcccgtgcgatcacagagcttggtatttacccggcggtagatccactggagtcttcatcaagaatgcttgatccacatatcgtaggcgaagagcactataatgtagcccgcggtgtgcaggaaattcttcagaaatacaaagaattacaggatatcatcgcaatgcttggtatggatgagctttccgaagacgataagcttactgtatcccgtgcgagaaagatccagagattcttatcacagccgttcttcgttgcgacacagttcacaggatttgaaggacgttatgtaccgatcagtgagactgttcagggattcaaggagatcctcgaaggaaaacacgatgatattccggaaggttacttcctgaacgcaggaaatattgatgacgtacttgctcgcgtgaagtaggagggagttcctatggcagagagatttgaattgaagatcatctctccggatgaagtattctacgaaggcgaggggacattcctcgaatttgtatcggtcgaaggagagatgggtgtatatcagaaccatattccgcttacaacgatcttagagccttgcgttatgaagatccacaatgaatcggaagtgaagaaagcagcaatcctcggtggatttgttgagattcagaaggataagatcacggtacttgcagaagatgcacagtggccggaggagattgacgtagagcgtgcaaagaaagcggaagagcgtgcaaaagagagacttgcaaagaaggacggaattgacatactccgtgcagaagtcgcattaaagaaagcgattgcaaggcagaacgcagtaaaataacaaagattgacgaaacagaatacgttctgaatgagagtagatttcattcagaacgtattttttgtatttttcacgctttggatattttttcatatagtaaattagatgaaacaggaaagagcaggtatttttatggattatcggttaccatattatatggcatatcctatgccgcttcagtatgatgacgaaagaattgaacgctacgattttgagtatatgaaaagtatgtatccacagacggcaaaaaaagttctgccttatgtagaggatgagtgcgaccggatggaatatgaggggagcatgatgtatgatgaatatcctgatcagcttcagctccgtttgatgtgcaggcgggtatatgacagaatgatgcgggaagaaaaagaggaactggagatggcagatgaagaagatgtggaacagcagtatctgcagatggggcgtcagcaaaacggaagaaatcggaaggatagagatcaacatctaagggaaattattgagattctgttattccaggaattgtttaagaggagaagtgatcacagaaaaagagggagaagatactattaaagtgcagatgaaaattgtatgctaaaacatagaagaaaaaatttttcctcggctgtctgcggacgaatgtgcggcgtgcaagaaagatgagcgggacatgagaacaagtgtgcgctggacggagagacaaaaatatggtaaaatactatagagatacgggacaaaacgagaaaatgaaaattttagaaaccgttccggtatcgtatatttggagagttcttttgacatgataagtattaagcagaaaaaagagtgacaaagaagaggcaaattttggggctgaaaacagaaggactggacgtcggactgatcagagagaatgaaaattgttttacaaataagaaatatgtgctataatactccgtggactaaaaagaaattacaggttattgtcccgtagataagagatagggattcgacagttaggatggcagaagggacgataacgatcacttgaaaatcagatgaagtaaaataaatggaacaatagaggtgcgatatggagcaatatataatcaagggcggcagtccgctcgtaggtgaagtggagattggcggcgcgaagaatgcagcacttgcaattcttgcagcagcgattatgacggatgagactgtgacaattgacaatctaccagatgtaaatgatattaatgtacttttagaagcgatggagggcatcggagcccagatccagagagttgacagacatacagtgaagattaacggaagcacaatcggtgattttagcatagactatgactacatcaagaagatcagggcttcctactatttacttggggctctgctcgggaagtacaataaggcagaggttgcgcttccgggaggatgtaatatcggtagcagaccaattgatcagcatctgaaaggattccgtgcgctcggtgcagaagttgagattgaacatggaaagattcttgcagaagcagagacactgaaaggtacacatctttactttgacgtagtatccgtaggtgcaacgatcaatgttatgatggcagcggcgatggcagatggactgaccattcttgagaacgttgcgaaggaaccacatgtcgttgacgtagcgaatttcctgaacagcatgggagccaacatcaagggagcaggaactgatgtgatcaagatccgtggtgtgcagaagcttcacaagacagaatattctattattccggatcagattgaagcaggaacatttatgtttgcagccgcagcgacaaagggagacatcacagtattaaatgtaattccaaagcatcttgaggcaacgatttctaaattagaggagatgggatgccaggtagaagaatttgatgatgcagtcagagttgtggcaaacaagcgcttaaaaagcacacaggtgaagacacttccatatccgggattcccgaccgacatgcagccacagattggcgtgacgttagctctgtcaaaagggacaagtatcattacagagagtatttttgaaaatcgctttaaatatctggatgaacttgcaagaatgggagctgtcatcaaagtagaaggaaattctgcaacgatcgaaggagtagaaaaattctcaggtgctcgtgtcagcgcaccggatttaagagcaggagcggcgcttgtgattgcaggacttgcgacggatggaatcacgatcgtagatgatattgtctacatccagagaggatatgaacagtttgagaagaaactgcaggggcttggtgcgatgattgagaaagtcgcaagcgaaaaagaaatccagaagtttaaactgaaagtaggataaggactatttcaaataaaaaataaatacagatcatacagcagtgaaaagcagcctgccagagcagatcggtcgaggagaccgggtgttttggcaggctgtttattttggttctttgtaaagtggaatttatagatagtatgaataagtattatagaaataaacaatttttcatccataaggttccatgttatagtgaaggttaaagaaaatcggagaaacttttctttgcagtatacaaaatatggaaagaaagaggatacgagggatgaaagaggcacagagtaactagaaaagttttctcaaaaagactcttgacggtcctgtcaatcagtgttatgatttctaacggaacaagaacagaataatagaaactttctcttattcagagcagtggagatacaaaggatctgtgaagctgcggcaaccccgtgaacggaaggtgccagcctgagcgagtaatcgaacaataagaggattgatttatgagtataaagcagtccgaatgttgtcgggctgctgtttttatctcagagagttttgataaatgactttttatcagagaaagaaagaacagtccggcgaaagagaaagagaaaaaagaaaggaacgtacgaatggaaaaattattatttacttcagaatcagtaaccgaaggtcatccggataagatctgtgaccagatttcagatgctgtgttagatgcgctgatggagcaggatccgatgagccgtgtggcatgtgagacagcgatcacaacaggacttgtccttgttatgggtgagattacaacaaatgcatatgtagatattcagaaaatcgtaagagatactgtggatcagattggatacaacagaggaaaatacggattcgatgcacatacttgtggtgtgatcacagcaatcgatgagcagtcttctgacattgcaatgggtgtagataaagccttagaagcaaaagaaaacaaaatgtcagacgaggagatcgatgcaattggagcaggagatcagggaatgatgttcggatatgcttcggatgagacagaagaattgatgccatatccaatcgcgctggcacacaagctgacattgcagctgacaaaagtccgcaaagatggaacactttcttacctcagaccagatggcaagagccaggtgacagtagagtacaacgaagagggaattccggtgcgtcttgatgcggttgtattatctacacagcatgatccggatgtaactcaggaacagattcatgaagatattaagaaatatgtatttgatccggtacttccgcaggagatggtagatgcgcagacaaaattcttcatcaacccgacaggaagattcgtaatcggtggaccacacggagacagtggtgtgacaggacgtaagatcatcgtagatacttacggcggaatggcacgtcacggcggtggagcattctctggaaaagactgtacaaaggtagaccggtctgcagcatacgcagcacgttatgttgcaaagaacatcgttgcagcaggaatcgcaaagaaatgtgagatccagctttcttatgcaatcggggtggctcatccgacatcgatcatggtagatacattcggaaccggaaaactttctaacgagaagttagtagagatcatccgtgagaactttgatttaagaccggcaggaatcatcaaaatgttagatcttcgccgtccgatctacaagcagacagcagcttatggacactttggacgtaacgacttagatcttccatgggaaaaactggataaagtagaagcattaaagaaatatttataagagacttcgatcatcagatgagaaagatagctgctccacagataagagaaaatctgtggagcagtttttgcatactgggtcgtacgaaggtttacaaaaattttataaatgtttataggtgttttggtgtatttaacaaggtggcatgatataataatgaagtcagattgagacaagcatagaaagtatatagaacaaaaggttggacacgatgaaattaaaaacacgactggtcattgcttttatgacaatcattattttgccggtgttcttgacaagcgctgtattttgtggattcgcacaacttcaaattcgttcgatcgagaagacatatggaattacaggaaccacctatgaagcactgttaaatagtgtgcaggtgccgagccggattacgaaagaggcatatcatgagctggagagggcagcggataaggatccggagaagctggaagatgcttcttatctggagcagtttaaccagaggcttcgtcagaaaggatcctatcttcttgtgagaaaggatgatattatcgtatatatgggagaagatccgcagaagacggaggcggtgattccggatttaccggcttatgaagaatacaatgcagattccgagaatggtgtatatattggcggagaagcacaggtacttgtaaagcaggtggattttgtcagtgatgacaagaacaagtgcagtgcatttattgtaacagatgtgacgagcatgctgccggaagtatcacaattcttaaaagacattcttgtggcggtcattgtgatccttgtcattaccggagcgctgcttgttgtctggatttacagaggaatcaagattccgcttgtgaagatgcagaaggcgacgaagaatattaaagaagggaatttagatttccgactgattccggataccgatgatgaactcggacagctttgtcaggattttgaggagatgcggaagcgtctgaaagacaatgcggaggagaagcttgcctatgataaggagagcaaggagctgatcagtaatatttcccacgacttgaagacaccaatcacagcgatcaagggatatgtagaaggaattatggatggtgttgcagatacacctgagaagatggagaagtatatccggacgatttataataaggcaaatgagatggatcttctgatcaatgaactgacactttactctaagattgatacgaatcgaattccatacaactttacaacactgtcagtcaatgaatattttgatgactgtgcagaagatctgaagttggaactggagcagagagatgtcgagtttggatatttcaattatgtagaggaagatatccgcatcatcggcgatgccgagcagttaaagcgagtcatcaacaatattgtgacgaattctttgaaatatatggataagaagcgggcgcggattaacttgcgggtgaaggacgtcggtgattttattcaggtggaattggaggacaatgggaaaggaattgccgccaaagatctgccgaatatttttgatcgtttttaccggacagatgcatcgagaaattcttctaagggcggaagcggtattggactttcgattgtgaagaagatcatcgaggagcatggcggcaagatttgggcgacaagcagagaagggacagggacggtcatgtattttgtaatcagaaaatatcaggaggtaccggtaaatgagtagaatattaatcgtagaagatgaagaaacgattgcagatctggagagagattatctagaactgagtgggttcgaggtagaagttgcaaatgatggagagacggggcttgagaaggcgctgacggaccagtttgatctggtgatccttgacctgatgcttccgggagtggatggatttgaaatctgcagagaggtacgtcagaagaaaaatacaccgatcattatggtctctgccaaaaaggatgatatcgataagatccgaggacttgggcttggcgcagatgattatatgacaaagccgtttagtccgagcgaacttgtggcgagagtcaaagcacatcttgcaagatatgagcgtttgatcggaagcaatgtacagacaaatgatattattgagatccgtggcttaaagattgacacgacagcgagaagggtgtgggtcaatggagaagagaaggcatttacgacgaaggaatttgaccttctgacgtttcttgcagggcatccgaatcacgtatatacaaaggatgaattattcagtgagatctgggatatggaatcgatcggggatattgcgactgtgacagttcatattaagaagattcgggagaagattgagtacgatacttccaaaccgcagtatattgagacaatctggggtgtggggtaccgatttaaagtataagagaagaaaagaagggccgcagtccggaaataagggctgtcggcagcgtgaggggttcctgtgccgttggtacagggattctttttttaggactgttatcttttcgggaagtgtagtataattgattcaaaaagcataaagggagaaaagtgaaagaaaatgtttaagtggaaagaaaaaagtgtaagattaagcacgatgcagatgcttgcagcaggcttcttgctcgtgatcgtgatcggcggaatacttctatggcttccggtctgcaatcaggagccgattgcatttacagacgcactttttacatcgacatcggcagtttgtgtgaccgggcttatgacagttgttccggcggcgcagtttacgcttcttggcaaggtagtattgcttgttctgatacagattggaggacttggtgtagtcgcagtatcgacattttttcttgttgtgatcggaaggaagatcacggtaaaagagcgagtgatgattcaggaaacgtataacatggagtctttatcaggtatggtgaaatggatcttgcggattctgaagggaaccttcgtcgtagaaggaattggagcaatcttttttgcatttcagtttattccggagtatggatttttgaaaggaatctggtatagtgtgtttcactctatctcagcattttgcaatgcgggaattgatatattaggggcagatagttttgcggcatatgcaagaaatccgctgatcaatctgacaacgatgatattgatcgttgcaggaggtatcggttataccgtgtggtttgacatcactgataatattagaaactttcgcaaaaagggtgagagaagacgtggaatgtttaagattttaaccttgaactccaaggttgcactgacgatgacggcaattctgattgtgacaggtacagtcagctttctgtttctagaattttctaacccggatacgcttggagaattttcttttggagacaaggtgatgggagcggcatttcagtcagtgacaacgaggacggccggattctttaccgtgccgcagggagatctaagagaagaatcggtgttcatttcctgccttctgatgtttatcggaggctccccggccggtactgccggaggggtgaagacgacaacgattgcaatgttattccttacagcggttactgtcgtaaaaggaaataaggatacggagtgctttggaagaagaattccggaagaaaatattcggacggggatttcggttatgctgatgtcttttacaatcttgatgatagggaccatagccgtttcagtgatagaatcggcgggatttcttgatattttgtttgagacgacatcggcaattggaacagtaggtctttccacggggctgactccggcgcttcacaccgcaagtaaatttgtgattatgatcttaatgtatgcagggcggatcggaccggtaacaatggcgctggcattcggattaaagagaaatccgatgagccaggtgagacagctgccggcgaaacgtctgatgatcggatagggggataaaaaatatgaaaaagcaatatgcagtatttggacttggaaaatttggttccagtgtggcagtgacattggagaaactcggatgcgaagtgatcgcagtagatattgcggaagaaaaagtacaagagatcgcagatcaggtatcttacgcaatgcgcgcggatctgcatgacacgggagtgatccagtctctgggacttcgcaatctggatggtgcagtcgtggcgattgccgataacatggaatctagtattatggctacgattttgtcaaaagaggcagggattccgtatgtgcttgcaaaggcgcaggacgagcttcatgcatccatcttaaagagggtcggtgcagatgcgattgtatttccagagatggagatgggaagaagagttgccaaaaatcttgtctccacaaattttgcagattggatcgagctatcaccggattatagtatcgtagagacaagggttccggaaaaatggatcgggaagactttgcgtgagcttcgcatccgtgagcgctatgggtttaatgtagtcggtattaaaaaggatgagaaagttgatgtcaatgtaagaccggagatgccgctggaagaaggcactattatgattttcatcggaagtaatgaaatgttgaataaatacaaaggggaataagtatgattacaagcacgtcaaatgcgagagtgaaggaactggtgcagcttcagaaaaaaagcaaagtgcggaacgagcagggagtctttcttgtggaaggcgttaagatgtaccaggagattccacaggagcagcttgtgaaagtctatgtatccgagacatttgcagacaaacagaaagaagaaatcaacaggctgaaagacagaaggaagttagaatatctgtcagatcatgtttttcaatatgtttctgatacaaagacaccacagggaatcctctgtgtcgtacgccagtccgcttactgtctggaggatattttagaggcagaagatgcacatcttcttgttttggacaaccttcaggatccagggaaccttggaacgattctgcgaaccgcagagggagcgggggtgacaggaatcattatcagcaaggagagtgtggatatttataatccgaaagttatccgctcaacgatgggttctatttaccgtgttccgtttgtctatgtggaagatttaaaagaagcgatcgcaaaagtaaaggcgcacggtatttttacatatgccgcacatcttgatgggaaaaatagttacgacaaggaagactatacgaaaaagacggcatttttgattggaaatgagggaaacggacttcgaaaggacatcgcggatttggcagatacatggatccgcattcctatgcaggggcaggtagaatcattaaatgcagcgattgccacatctgtgctgatgttcgagactgcgagacagagaagaaatcagggataaacaaagaaataaagatggacaaagagtatcattaaaaagtaaaaaggatagcagttgatcttggggaagcaccaaaagatcagctgctttttttgtccagaaaaatcatttgatatcgtgcgggagacggagaaaaaagaaggtgacctttggaaggagaaaatttccagagcggaaaagttgacaaatgaaagaaaagctgttaggatgttcctacaaacaaaatgtaacaagtttgtaacaaatgtaataaaaatgaattaaaagagtataatataattaacttttaattcgttttattgcaaaatcaggaggaaaagtatgagaaaagagaataagaggatgctggcagtagttttgtctgcggtttgtgtgctcacagctgcaggaatggacggaagtatatctgtggcatcaactgaaactcggcagactgacagtatagagaaaacacaaacaatttcatcggcattggcatcagcgctggagcagataccggaggtcgcagcagttgcagtatccacgcaggaatggcaccaaaaggcagtatccaacgtggatggggagactgatgtactgcttgcgggagaagaaggaagtgaagtcgttggaaaactataccacaacacaattgtagatgtggaagaaaaaggggttgtatggacaagagtttccgcagatgaggtgaacggatatgtgaagagcgattcccttgcatttggaacggatgcagtcagaagggcagatcaggtgtgtccggttgtagaaaagccgatggaagacaatggagcaattgtacggacaagggagtctgaaccagcgaaaacgttagcgcagattgaagaagaacaaagagcggcagcgcaggcggcggaagaggcaagaaaagcagaggaagcaaaaaagaaagcagaggaagaggcggcagcagcgcaggcgcagcagcaggcacaagaagcacaggcttcccagcaagcagtgacagctgccaccagcggggagcaggcattgcttgcagcgttgatcttctgtgaggccgggggagagccgtatgaaggtcaggttgcagtaggggctgttgttatgaaccgtgtaagaagcggcattttcccgaactcaattacagaggtcatttatcagagcggacagtttggtccggcaattaccgggaagctggatgcggtacttgccgatggtcggacaacggcaagttgctatcaggcggcggcagatgccctcgcaggagccaatccgatcggggaggcgctttattttggaaatggtgattacggacagttgatcggaaatcactggttccactaaaaaagaaaataggggagtaaaaaaatgtctggagttctgcaggggatgtgaaaacatcgaaatcgcagcattccagacttttttataagtcatagatttcgcagataatctcataggaaacatctataatattataaaaaatagcaatttgacttcgttttaaaacgactatatcatcataagtaaaggtcgaaatatggaggaaaactaacatggaagtgattaaagaattaccagaagtatttgaagagtttgccgagcagcgcaaaaactcatttcttgctatgaagcaattaaaagataagggaatcccggtagtcggagcatattgtacatattttccaaaggaaatcgcaacggctatgggagcagcgacagttggattatgttccacatcagatgagacgattacagaggcagagaaagatcttccgaaaaacttatgtccgctgatcaaatccagctatggatttgcgaaagcagataaatgtccgtttttctatttttcagatgtagttgtcggagagacgacttgtgatggaaaaaagaagatgtatgaatatatgtcagagtttaaagatgtatttctgatggaactgccgaacacacagagtgaggaagcgctgaaattgtggaagagcgaaatcatccgtttcaaagaatatttagagaagaaatttgaagtgacgatcacggaggacgatatccgcaaggcaattcatgaagaaaataaggtccgcaagtctttaaagagattttatgaagtgatgaaacatgatccggcgccgatcacaggtatggatcagtttaaggtactctatggaagtggcttcaaattcgacagaacagcgatcccggcagaggtggacggaattgttgaaaaaatcgagagagaatatgcagaaggaaagatgttaaacaagagaccgagaatccttttgactggatgtccggtagggggagcaagcgagaaggtgatcaaagcaatcgaagagaatggcggtgtcgttgtgacttacgagaactgcagtggtgcaaaatctatcgataagctggttgatgaggagaatccggatgtatacgatgcacttgcaagaagatacattgatatcggatgttctgtaatgacaccgaacccaaacagactggaattgttagatcgtctgatcgatgagtacaaagtagacggagttgtagagatgacacttcaggcatgtcatacatataatgtggagacactgggaatccgccgttttgtcaatgagaagaagggaattccttatattaatgtagagacagactattctcaggcagacatcggtcagctcaatacaagaatcacagcattcctggagatgctgtaacatgtcagaagaggtaagaaacgtgaattatgtagggattgatattggctccaccgcatcgaaggtagtagtaagagggacatccgatatgcagtttgtgcttcctacggggtggagcagcaaggaaacaacgcagacgatcaaagagaagttaaaggaaaatgatgtggatgtcctgggagatgagacgaaagtcgttgcgaccgggtatggccggatcgcagtagattttgccgactatgtgatcacggagatcacctgccatgcaaggggcggaagagaattggcgggaggagactgtacggtcattgatgtcggaggtcaggacacgaaagtcatactgatcgagaatggaatggtacaggattttctgatgaatgataagtgctcagcaggaactggaaagtttttggaaatcatggcaaacaggcttggtgtgacactgcaggaactttttgatctggcagaaaagggaaccgtgctcccgatcagttctctctgtactgtttttgcggaatcagaagttatcaattatattggagaaggcagaagcagggaggatatcgcagcaggtgttgtggactctgttgtgacgaaggtagcgcagcttgctatgcgaaaggcaatgacagaccgtgtcatcctgacaggaggactgagtcacagcgcatattttacaagacgcctttctgagcagattggaaagaacgtggagtcgactgcagatggaaggtatgcgggggcgctgggcgcagcgatccttgcagaagaaaagtcaagaagagggagatagaggagtatcggtttttacggaaaagccagtacgttattaaaaggaagagaggaaataagagtggcagaaaattctgcacttcttacaaaaaagataccgaaattcagacggtatcttttttgtatctgactattgtatttggaagaaaattatagtaagataaggaaaataaataacacaatagattctgtctaaaagagagacggatcgttgaaagggggactttctatgtattacgcaacaggaagcatcatgacgatggtgcttggaattgtttttcttatcattattgtagggcttctgatttcgtgtattaagattgtgccgcaggcacaagcgatggtaatcgaaagactgggtgcttataagacaacatggggagtaggattccatgtcaaagtgccgatcatcgagaaggtagcaagaaaagtggacttaaaagagcaggtagtagattttgcgccacaaccggtgatcacaaaggataacgttacaatgcagattgacacagttgtgttttatcagattacagatccaaagttattctgctatggggtggcgaatccgatcatggcgatcgagaatctgaccgcgacaacccttcgtaatatcatcggtgatttggaattagacgagacacttacctccagagagacaatcaatacgaagatgcgggcatccctcgatgttgcaacagacccttggggcattaaagtcaatcgtgtagagttaaagaatatcattcctccggctgcgatccgtgatgcaatggagaagcagatgaaggcagagcgtgagagacgtgaagcgattctgaaggcagaaggtgagaagaagtctacaatccttgtggcagaaggtaacaaggagtctgcaatccttgatgcagaggcagagaagcaggctgcgatccttagagcggaagcagagaaagagaagatgattcgtgaagcagaaggtgaggcagaggcgatcctcaaggtgcagaaagccaatgcagacggtatccgtttcttgaaagaggcaggagcagatgaggcagttctgacgatgaagagtcttgaggcatttgaaaaggcatctaatggaagagcgacgaagattattattccttctgagattcagggaatcgcaggacttgtgaagtctgtgacagagattgcaaagacagagaaagaacaataaagaaataaaagaggaaagtcataagaggaaggcggctgctgcaaaggattttgcggcggccccttcgctttccacctgacaggagggaattttgtgaaaccggtgatagatcttgagaaaacatatggaattgtatttgacggtggaggcgccagaggagcatatcaaattggagcatggaaggcgatgcgggaggccggtgtcaagatcagtgcagtggcaggcacatcggtcggagctttaaacggtgcacttgtctgcatgggggatctggagcgagcggagaaaatctgggagaagatcactttttcaagagtcatggatgtagatgaccagatcatgcaggaattgtttgatagaaagcttccactccacgaagcaatccatgaagtgctcactgtgataaaaaatggaggagtggatgttacaccgctgagagaactgatccatgaaatggtggatgaagagaaaatcagacagtcaaaaattgcattttatctgctcacattttctttgtcagatatgaaggagctggagcttggaatcgaagatattccggaaggactgctggaagattttcttctggcgagcgcttatctacttgggtttaaaaacgaagaactgcatgggaagaagtatatggacgggggcgtgatcaacaatgtgccgcttggaacacttgttgagcgcgggtatcagaatattatcgaagtgcggatttttggtccgggaagagagccaagggtatatttacctaacgatgtgacagtctatgagattgcaccaagggtgaagcttggaagtattattgaatttcaggaaaagcgaagcaggcagaatatgaagattggatattatgatgccaaacgagtgatctacggacttgcgggtacgatttactatattgaacaaacgaaagaagagtggtattatgaaaagaagtttgagggcctgacagagcatgaccgcagggagattgcattctggctgaagcttccgctgcgcacaaaggaagcagagttgtatcttgcaatgttggaggcgagcgcaaaatatctgcatgtcccaaagtaccggatctataccgtggaagaattatttgatcttgtgaaagaaaaatatgaaaagaaagacaacaaagaggctgttccatattttacggaactgcttcttgcgatgggaaaggaagaataatatgaatttaaaaggacgtcattttttaacattaaaagattttaccgcagaagagattacatattttcttgatctggccgcagaactgaaggaaaagaaaaagcagggcatcttgactgaaactttgcgcgggaaaaatgtagcgctgatttttgcaaaaacaagtacgagaacccgctgttcttttgaggtggctgcccacgatctcggaatgggaacgacctatctggaaccggctgcgtcacagattgggaagaaggagagtatcaaggatactgcacgggtgcttggaagaatgtttgatgggattgaataccgcggatatggacaggaaatcgttgaggaactggcaaagtatgcaggcgttccagtctggaacgggcttacgaatgaatatcatccgacacagatgctggcagatctgttaaccatccgggagcactttggagatcttgcaggaagaaagcttgtgtatatgggggatgcccgctataatatgggaaattctctgatgatcgcctgcgcgaagatgggaatgcactttgtggcatgtgcaccggagaaatactttccggaccaggcacttgtggaagaatgccggaaatttgcagaggaatctggcgcaacgatcacactgacaaaagatgtcagcgcagggactaaggatgcagatattatttatacagatgtatgggtatctatgggagagccagacagtgtgtgggaagaacgaatccgtgatctgaccccgtacaaggtgacgatggatgtgatgaaaaatgcgggagagcaggcaatttttctccactgtctgccggcatttcacgattgggagactgaggtcggaaaagagatgggagagcgtttccagatcaaagagatggaagtcaccgacgaggtgtttgagtttgcacagtcgaaagtattcgatgaggcagagaatcgtatgcatacgattaaggcagtgatggctgccactctgggagcatgatcatgaaggcagagatattaaaagtgcttcgggaaagcagtgggcatgtctccgggcaggagctgtgtgaacggttccaagtgtcccggactgccatctggaaagtaatctcacagctgaaggaagaaggatatgagatcgaggcggtgagaaacaaaggatatcgactccaagagagcccggatgtgctttctaaagaagagatggaaagcaggattgagacacggacaattggaaagtgtgtagaatattatgcagagacagactctacgaacattcgtgcaaagcaggcagccgggcagggagctgtgcatggaacactttttgtggcagacaggcagagtgcaggaaaaggacgcagaggaagaagctgggattccccaaaaggaactgagatttttatgtctttgctgctgcggccgcagtttgttccggacaaggcgccgatgctgacgatcttgatggcgattgccgcggcggaggcagtaagagataagactgatcttgaggtaaagattaagtggccaaatgatcttgtgattggcggaaagaagatctgtgggattctgacagagatgagcgcagagattgattacattgactatgtggttgtcggagtcggagtaaatgtaaaccggaaggaatttccggaagagcttagagagaaggcgacgtcccttctgctagaaggaaaggtttctataaagagatctgagttgattgcagagatcatgcagcggtttgagacgctttatgaagcgtttgaaaaagaacagagccttcgttttgtgcagcagagatacaatgagcagtcagtaaactgtggacggagagtgacagttctggaaccaaagggaaactgggacggcatagcactggggatcaatgaagctggagaactgctagtagaaaatgaagcgggagagatttgcacggtttatgccggggaagtatcggtgcgcggaatttacggatatgcgtattagcataaatgaattagaaaaatggagtaacaaaaacatgtacgaagagaaagtagtattgtgcggggcgaactcgtatgaaaaaaaatattatctaaatccggattttgaggcattgccgcaggaaattcaggatgaattgaagattctgtgtgtactttacacagaagatgtgggggggatcctcacactcgtctttgaagaagatggaacactttgctttgaagtgacgaccgaggattttgatccaatgtttgatgaaattggaagcaagctcaagatcaaagagatacagcagacaaaagaagaactgttgagatctttggagctttactataaagtatttttcttaggagaagaaatttaatgttattggttatagatgttggaaatacaaatattacactgggtgtatataaggaagaaaagctggaagcgaaatttagaatgacaacaaagcttccgagaacatcagatgaatatgggatttctctgtgtgatctgattgaacaccaagggtttgagatccggcagattgatgcagtcatcattgcttctgtcgtgccggatattatgcactctctgacaagtgcgattattaaatatctggatgtatatccccttgtagtctcaagagagattgagacgggaattaagatcgggatggataatccgcgcatgggaccggatcggattgtagatgcagttgctgcatatgaaaaatatggcggtccggtgatcgtcgtcgatttcgggacagcgacgacctatgatatgattgcagaggatggttcctttatgggaggatgcattgcaacgggaatccgcacctctgcgcgggcgctttggggcggggcagcgatgctgccggagattgagatcaagaagccggaagtgatcatgggacaggaaacaattacaagtatgcaggcgggacttgtgtatgggtatatcgggcagacagagtatattgtccaaaagatgaaaaaagaaacaggattggagaatgtaaaagtcattgcgaccggaggccttggtaagatcattgtctcggagacagacgtttttgatgcctatgatcagaatctgacattggacggacttcggattctgtatgagaagaataagaagtaaaaagcagaaaggaaagagatgatacacaaaaatagattgaaaatagggacagtagagctggagaatccatatatactggcaccgatggcaggagtgaccgacctgccttttcgcttgctctgcaaggagcagggggcaggacttctctgcatggagatggtcagcgcgaaggcaatccagtacaagaataaaaatacacaggaccttcttcggatccacgaggaagaacgaccggtttctcttcagctattcggttctgagccggatacgatcagtgagattgcaaagcagattgaagaacttccgtttgcgatcctcgatatcaatatgggatgcccggtgcctaagattgtcaaaaatggagaaggttctgcgctgatgaaacagccaaagcttgtctatgagatcgtgagcaagacagtgaaggcgatccaaaagccggtcactgttaaaatccggaaaggatttgatgattcttgcattaatgcagtggaaatcgcaaaggtgatcgaggaggcagggggcgctgcagtggcagtgcatggccggacaagagagcagtactattctggaaaagcagactgggagatcataaggaaagtgaaagaggcagtatccatcccggtcatcggaaatggagatgtgacttccgcagaagatgctgtgcggatgcagaaactgactggatgtgatggagtaatggtaggaagaggcgcacagggaaatccatggatctttcgagagttagtagaatatgatagaaccggaaagattccgccacgcccatcgctggaagaattaaaggagactatgctgcgtcatgcaaggcttcagatcgagtataaaggagattatctcgggatccgggagatgcggaaacatgtcggatggtatacgaccggattaaaaggagcagcagctttgcgggcagaaatcaatcaagtgcaaagttacgaggaattggaacaattacttggaaacaaattgacattataggtaaaaacatgtataatgttgaaattgtgaaaatagaattattttacaggaaatattcgctgaaaggctgacaaataataggggaatgttataagcatacaaggaggtaatatgcaatggcagacaaaaaaacaatacttacttatgcagggttaaaggcattggaagaagagctggaaaacctcaaagtagtaaaacgtaaggaagttgcagcaaagatcaaagaagcaagagaacagggcgatttatcagagaatgcagagtacgatgctgcaaaagatgaacagagagatatcgaagcaagaatcgaagagatagagaagattttaaagaatgcagaagttgttgtagaggatgaagtagatttcgataagattaatatcggatgttctgtactcgtatatgacaaggaatttgacgaggaaattcagtttaagatcgtaggttccacagaggcaaacagccttcagggtaagatctccaatgaatctccggtaggacaggcactgcttggcaagaaagtcggagacgagatccaggtagagacgcaggcaggcgttatggaatacaaagtgttaaaaattgaaagagcaaactaaggagtgagagaagtggctgaacagaagaaggtacaggagcaggacgtaaaccagctcagacaggtgcgccgggagaaactggcagatctgcaggcaagtggaaatgacccgttcgtcattacaaagtatgatgtgacacatcatagcatggatatcaaggatcattttgaagagatggaaggaaaagacgtagcgatcgcaggacgtattatgtccaaacgtgtgatgggaaaagcgtctttctgcaatgttcaggatttacagggcaatatccagtcttatgtcgcaagagataatatcggagaggaagcttataaagcattcaaaaagatggatatcggtgatattgtcggaatcaagggagatgtgttccgcacaaagatgggagagatctctatccatgcgcaggaagtgacattgttatcgaagagtcttcagatccttcctgagaaattccacggtctgaccaatacagatttacgttaccgtcagagatatgtagacctgatcatgaatccggacgtcaaagatacatttatcaaacgttctaagattctcagcgcgatcagaaaatacttagatggacaaggattcatggaagtagaaactccaatcctcgtttctaatgcaggaggagcagcagcaagaccatttgagacacattttaatgcactcaatgaagatttcaaactgcgtatctccctggaattatatttgaagagactgatcgttggtggtatggaacgcgtctatgagattggacgagtattccgcaacgaaggacttgatacaagacacaacccagagtttacattgatggaattataccaggcatatacagattacaacggaatgatggatctgacagaaaatctttaccgttttgtggcacaggaagttcttggaacaacgaagattacttacggtggagtagagatggatcttggaaaaccgtttgagagaattacaatggtagatgcggtgaagaaatacactggtatcgactggaacgaagtgactacactcaaagaagcaagagaactcgcaaaagaacataaagtagagtttgaagagcgccataagaagggggatatcctttctctgttcttcgaggcatttgtagaagagcatttaatccagcctacatttgtgatggatcatccgatcgagatttctccgctgacaaagaagaaaccggagaatccagaatatacagagcgtttcgaattcttcatgaatggatgggaaatggcaaacgcatactcagagttaaacgatccgatcgatcagagagcacgtttcaaagcacaggaagagttgcttgcacagggtgatgaggaagcgaacacaacagacgaagacttcctgaatgcactggagattggtatgccgccaacaggtggtatcggattcggaatcgacagaatgtgtatgcttctcacagattccgcagcgatcagagacgttctcctgttcccgacaatgaagtcacagggcgctgcgaagaacgaagctaacaatgctgcacagtctgctccggttgaaaaaacagtggaaaaagcaattgctgaagtgaaagaaacatatgatttctctaatgtagaagtggaaccattattcaaagatatggttgattttgacacattcagtaagtcagatttccgtgctgtaaaggtaaaagaatgtgaagcagttccaaaatctaagaaacttctgaagttcgtattagacgacggaagtggcgaaaatcgcgtgattttaagcggtattcacgattattacgagccggaagaactggttggcaagacattacttgcaatcacaaatcttcctccacgtaagatgatgggaattgattcttgcggtatgattatctccgctacacaccttgtagaaggaagagaaggactcaatgttctgattctggatgataagattccggcaggagcgaagttgtactaagaaagtaagaaatcttcacaatttgacaacaaaaattctttttgacaacaatttgacaacaaatttgtattcaaacatgaatcatcatgaagaatggtgattagttgtcagtaatactactccaacaatatgaattgttgagggcactttttgaaagaaaaatctttcagagagtgccctttttttattcattaacaatgttcgttgtggtcgaataaaaggtgaaaggggaaacagatttgaaaacagaaaatatgtattataaccagcagaagcgttcagaggtaaaagaagaagcacgcagacttagaagaaaatttcttcgttatcaacaagctgaaattgtatatagtttgtcacataaaaaattgatggaactagcaaatgatgcaggagcgatttacagaaaggtttgaaagcagaacttggttctgaccgattgcttggagttccgcttgaaacatacatagcttcagagaagttggctattgagtcaggaagtgctgacaagaatatagaaataatgaaagcatatatgtgcaagcaaagaggaataaggctgattaaactgccgatgaaaggcacagaactggattatgccaataatttaaagaaagtttttcagagcgtatgcaaatgctaatataagaatgtaggaaatatggcatataaaaatgtcggaaaacctacattcttattttgtatttttaggtgtattgttacacttccttatggaggtgaacactgcatgaaaaataatcttaaaggagaactggcagttatggatagtcttgatatcaagcccaactatgctgctctgggaagaaagtatggtatggactggaggacagttaaaaaataccacaatggttatgaagggaggtctgataagcgaaacaagggaagtaaattagatgaatacaggaatgaaataaaagacaaactggctatcaaaagaattactgttcagggggtatatcagttcatgttaaagaaatatggtgtaaaccgaataggttaggtaagctccagagcatgaccgatgaggaatttgcagaaatttctttggaagcggcagaatgaatgggagtcggtactagcaaaattcgacaccacatgatataatgtttttcagtcagattagagcagtagggatagcctgtaatccgttaataaacttaacgctttataagtttccgattgtgcaaccgttggatactccaatatccttcggttttctaatctgattataaaccagccttgcggattttgcaagaggtttaggataggggcgccttgcgcacctttattttttgccaatttacaggttcggagtatctttttctcctgttgttcctgttccggatcgggctgcgtccgtccgagatactgattgagattttcctgtttccgtttcagctcacgcactttataaagatatgaaaaataagaatgggcagattgaagattctgtaactacagatgaaagcatgaaactgactataagttgtaagaaaaatgtttttgacattgaacatctggaatttcaatatctcgaaaatgttccggttctgcaggacataaaccttacaattgaccacagaccaactgcgatcatcggtcagaacggcgcaggaaaaacgactcttgtaaagctgttaaaaggtctgttaaagccggtgggcggcagcatctactacggtggtagcgacatggcagaaaagaccgttgcaatgttggcaggggagatcggttacgtattccagaatctggatgaccagattttcaaatatcatgtgatcgtggagtaaattcttggagagtcaaggcaataatcgcaatgttatagaaaatatatgcaatgtacactgaaaaagttcaatgctaaaatccacttaaaatcatgatttgaaaatgttaaacaatgtttttaggaggaattacaatgaacgaagcaacgaaatataaccgtgcgaaaacatggcagatcgcattgtttgcattaaatatgatgtcaacaaatatgtatctgtttttaatgatgtatgtatcttactatgcaaatggaattttaggaatgtctgtagtatttgtatctacactggcaactgctatgcgaatttttgatggatttacagatccgatcattggatggctgatcgatcataccaatggacgttttggaaaattccgcccattccttgttgtcggcaatgcgcttcttgcattaagcatgatcttattatataagaccacgcatttagttccggaagcactccagatcccatattttattgttgtgtatgcactttacattattggttataccgttcagggaacagtcacaacttctgcacagactttacttacaaacgatccaaaacagagaccgatttacggtttctttacaggcttttttatgctgttcttacagaccggaattataatgcttgtttccaattaccttgttccgaaatatggcggaatgacacttgaattcttcagtgagatcattgtctgggtaattgcaattgcttttgtattaatgatctgctcactgattgccattgctccaaaagataaaccggtatactacaacagcatggtaaaaaataaggaagaaaaagtcagcttcaaaacttattgggaagtattaaaacacaacagagcacttcagatgttagttatttccgagtctacagataaacttgcatcaagtattgcaggaaattccatcgtaggtgttatgctttatggaattattattggtgactatgcagtaatgggaagattgtctgctatcacaatgattccaaacattattttacttgtaataggtattatgggagcaagacaagccggacagaaaaagacgtatgtagcgactgtatatggatgtattgttgttcagctcgcaattacactgcttctgatttttggtgatccaacgaagattgatttgaagtcctttggatttatgaatattgcatttgtagttcttattattgcattgaatggaattcgtaatatcggaagtaatatgatgattccaatgatggcagactgcaccgattatgaagtgtatagaagtggacattatgtgccgggactaattgcaaccgtatactcctttattgataaacttatttcatcatttgcaactacagctgttggagcatttgtagctgtcataggatataaaaattcagtgccacaggtgggagatgcaagcacacctgaaattctgatgatcacaattttattattctgtggcatgccgattttgggatggattgcttctattattgcaatgaagttctatccattgactggtgaaaaaatgaaggagattgaggacagcattgctgaaacacagcagaaaaatgctgtaaaggcataattatgagagacgaaaataaaaatataattccattgtggggaccatattcgaaaaagtatatgggtatttcaagaattatgaaggagagtgctgttccaggagcaagatttgattttgtgatacatccgacatatgcgaacagcaatgtaccggctccaaacgttacaatcccatctgagtatcatccgtgggattgtgatagtaatggaaaatattatagatatcgctatgagcttctttggaaagataagttatatgcagacgtagatttctttgagattgaggaggaaacctggggaatccgggtttccttccataataatacggataaaaaccagaattgccttatcaattattttgccgcagaggaatatccgaaaagcagagtatacacgaaaaaagtaccggaaaaaagtgatgcgtggaatgctgtcgattatgaaaatttggagtttggaaaagcagttccatgggaacacctgaatctggatgccatgaaaaagggagagattctggtcgatggatttacggatgacaatggattgggaatgtcctactatgcactctttatgcgttatcttggattgaaagcgtttggtggcaatcagggcgacaaagtttcttatcaggtaaaattaaaggaatcgtatcaggatgcagtgttagcgataagatatcgtacattgcaggatgagggagatgtaatttttcaaagcaatgttggaacaatccattttgctgcaacaaaagagagtggaatctgctatgttccaatcggaaagatttcagataaagagttcatctttaaaatggaagctttcagcgaacagagtaatggaataatgcttgattttttatgtgtttgtgaaaaatcagacaaaaaggaagtcggaataacagaagaggctcgtaatgtaatcccaaaagttgagtgcgagaatgatcatataaaatatcagtacaactataaggaaaatccaatatatcttagcattttaagcaagcgtgtcagaagcagaaaattgtattcaggctgtattgaggatgcattagtatcacgccttgcaaattcagatgccacttatgataatctgacgagaagtttttcgggtgcatttcaggataaacattcggatgaaggcttttatcatattaatgttgcagaagcgttatttgttcccggaaaaagtgtcagaacggaatatgcatacatcagtacaaaagaacgtaattattcaaaagctgaattagaaattttctggaaacaatgcagaagcattgtaaaaaaagaaaattgtgccaatgaagagggaaatccatttgaatttacaggacggataatgaaatctgcattatatagtaatattgtgtatccaatcaggcggcatggtgaatacattgcgcattatacaccgggaaaaagatgggacagtctgtatacgtgggattccggatttattggacttggaatgttagattattcctcaaaacttgcagaatatgtaatggacacttacttatccgaaccagataatacagatttcgcatttgtggcacatggttcacttgtcccaacacagttttatttgtattacgagatattaaatcgggcggatgcaaaagaacgggaaaatttgaagaaatactatccgatgtttttacgttactatcgttatatggctggcaggacggaaggatccacaatgtcaagacttggaaatggtcttctgacagtatatgactatttttacaatgcaagtggaatggacgattatccaccgcaggtggagttacatcgaaagaatatggaacaggtagtatcaccggtctgcagtaatgtacattttatccgtattgcaaaatttatgaaacagatttcaatggcatttggatatgaggagaatctgccggaatttgagcgggatattgaacgtgtaaagaacgcattgctggcatatgcatgggatgaagagagcggatattttggctatgctgtgcaggggcaggagggagtccatattttgcggactgaggcaggagaaaattataacaagggagtagatggtgttacgccgttgatcgcaggaatttgctcaaaagagcaggaaaaacagttgttaaagcacctgaaatctccagaggaactgtggtccccggttggaatttctacggttgatatgtctgccagctattattacgataacggctattggaacggaagtgtctggtgtccgtatcagtatttcttatggaaagcaatgcttgatataggagagggacaatttgcatttgatattgcacacagaggactgaattcctggaagcaggagattgaattcagttataatacatttgaactgatacagattgaaacggaacgtggcggctggtttcaccagtttagcggactttctactccaatttctatatggtataatgcgtactacaagagaggaactttaacaaccggatatgatacctggattgaaaagaaagaaatttctgaggatgtggatcatgcagaaattgtatacagtaccacaggaacacatacaggcgtgcttctgattgtcatgaattcgctatatcactatgatgttgaaatagatggtaaaaaggcagaatttatagaacgcgaagaaggtgtcattgagattacgttaaacagaaaagaaggcgttataataatatacagagatgaaaaataatgaactatatgatgaatacttagggtatcaagtcatgatcagttccagcatggaagtgcatcgtttttgtaccacagcgatacaaaatgcaggagtggaacggcatgatttttttgaaatctactgtgcattagacggaaacataacatttacagtcgatggcaaaaaaattgaattagagaaagaagatattgtgctgcttcctcctatgacagaacatcaggaaataatttcagagagggaagcagacagagtgatcctttggctgaatccatggtatctgaaccgcatttcaagcaggaaaactaatctgaaccagtgttttgtttcggcagagaagaaaggatatctgctccgggaagatccggcaatgcggaaaaaaatcataaatatgcttttggaattacgctatgaaatgcatgagaaagaatttggctatgacattatgtgtgattcgctggtagaacatctgcttatcttactggagagacatttaaatctgaatacaatggcaggaaatgcgaatatccagcaggtaatccggtatatcaatttacattatacagagaatctgacactggattttttgtgtaaccgtttttatatcagcaagttttatttgtccagaagtttcgaaaatgcaataggaaagagcatatatcagtatgttctggaaaaacggatgatcatggcaagacaattattgatcagtggggaaaaaccaacggatattttttcattatgtggttttggacagtacagtaacttttatcgtgcttttaaaaaatattatcatatgtcgccaatgacatttttaaagaaaatgaattatgaagaaaagaatgaatgagtctgagaaggctgacaactatggcggtagtttcgatgtgtgacatgcataatccgtatattcagatctcggatgtagtttcttataatcattattatggatggtatggtggagacacttcaatgaatggcccgtggatggatgaattccacaaagagtttccaaagatcccgatcggcatgagtgaatatggatgtgaagcactgaattggcatacctcagatccgaagcagggtgagacaaagcttctagcagtggcaggcgaatgccgggatgaaagctttatcaaaaaagttgagaagtttaatgaagcgtaccgtctgaaagaaaaaggtgctgttttaaattggtttgatatcacggcaccggatggtttcttctcgttaaatgatacgatgggtgatattatgtcgaatgaggatggaaataaagtcatgcaggaattgtttcagagctttggacaggcaaaggcacaaggcggtggaatgaacagtggcatgatgaagatgctgagtggattcacggtactccgaatgatcaatatgatggggattaccagtcagatgacaagcaaggccggagaagcagagaaaataaacgaagtgagtaaagaacaattgcttgcaataaatgacaggctgaatcagatcaggaaataaaatttctattataatgataatggatggaaagtaaataagcacaaattttgtcagaaatgaatcaatccctgacggacttgagtatgagcatatcagaaacagtccgccggggatttttatgttataggaaactttgttctgtacacaaatgaaagtgtttttatggagatcatatgtaagcgctaaataaaatagtatattaaacaaaaatgcaatctgcgatttttacagattgcatttttatcgtatttttactatgagttgatcttgcaaatttatgatactatttctaactttatcaggactatgattggattattggtgttattagttttagttttcatgagtggatatttgtttatttataatacattgtacatttctgtaaatcgagatatacggtattttggccagcttaaaacaatcgggacaacatctgttcagattagaaagatgatttataagcaaatgttgtggaacgcaatgataggaataccattagggctggtttgttgagagtgtgaaactttttctgtaaagaatgttttagaaggtcttctatgataaaataaattatcataaggaggccttttactatgacaagagaaaagaaacctgtacacagagtacaaatgaccgtaagtaggtaatcatccgtatctgttttgcactacatttttctgatacaatcacctcagaataagaaaggaactgtatcattatgaaaaaagaggaaaaacttgcattgtggtctggacggattcatgcttttcaagcaagtgggcaatcttgtaaaacatggtgcctggaaaaccaaattcctgcgtctacaatgggatactggatgcgtagattacctacttacaataagagttatgttttttagaaagaaactttaaatatctatattccttatccttatgccagatgcggaaagtacagtaatctggagactttaggcaaattctattatgtctgaaggaaacagtatttgttttattaaaacaaatcaaaagtttttgttaagtaagcgatgtgcttgtgtggaattagaatggagcgattattattgacatgtcgatgaagattatccataacttctattggaacgtgttcggttaaatatataaggaattttggtgatgttatgtattatcttagacagttatgggaaaatggtgattattataaatggagatgataatcgttttagtgtatacattttttgaaaagttaaaaaaatatgtgccaaaacaagcaactaatatgttatgataaatatcaaagaaccgtttgatcgaaggatgatatatcgttttaagtgtaatctagcatacaccatctgatagaaagtaggcttgtggttctataaatagtgaaaaacgtgtacaaccatatgactttaatgaggaagtcatatggttgtttttgcaattaaaaataagaaagattgaaattgtcgttcaggcaattaatgtagtataatgaaaaggaaatgaaactttgcatatgaaaaagaaatgtacatattagaagtggaaagacaaaagccgaatagcgttattgaaatcaatgaatatgataaagtggtgtacatgtggtattacaataatcaaagagtaataaaaagggtgattgattaaatgatttggtggatgtatctaagtaaaaattttagaaatatgttctgttgaactactagattaaagtagaaatacatttacgagagaggtaacgtggtttttgttgttatatttttgatgtttgcaatcgttgcggattatgcccacgcaatgcaataaggagaagggaaaatgaataagattttgatgatcgcatggatactggcaggaatctcatcgtttgttgtgccgccagatatggaatatttgaactatattgattttcatacactagggttactattttgtctgatggcagtcatggcaggcctgagccgggaaggagtatttggacaggcggctggaagattgatcacagttgtgaagaatagtcggcagatggaactgattcttgtgtttttatgttttgtgtctagtatgttgatcacaaatgatgtagctttaatcacatttgtgccatttgcaatacaggtgctggagatggcaaatatgagaaaacgaattgttccggtaattgtcatgcagacagttgcggcaaatttaggaagtatgtttaccccaattgggaatccacagaacctttatctgtattccaaatcaggaatgacattgagtgcattttttaaattgatgctgccgtacacactacttgcagcagtgatgttgcttggaatgattttgttgagaaaatgtgttgtgcttggtgatttacaaatgcgggaaagcgaagaggtgaaaaatccgtggaaagtagctatttatgcaataatttttctattgtgtcttctttgcgtatcgcatttgcttcctgtttgggttgtaatgctcgtgacaattttggcagtgtttgtgatggatcgtggaacttttaaagaaatcgattactctcttcttcttacttttgcaggattttttatctttatcggaaatatggggcgaatttctatgttttgtaatttcctgaagggcattttgaatgggaatgaaatattgactgcggtcatttcttcgcaggtaatcagcaatgttccggcagcactgttactttcaggatttacagatcagtggtcgaaattgattatcggaacaaaccttggaggattgggaactatgatcgcatccatggcgagtttaatctcgtatcgttttctcatagcggcctatccaggagaaaaaagaagatacacaatgcattttacagttgtcaatctcgggttcctgctaggattcctgattgctatgtggagcgttcggagttggtgatggaaaagtctcgtaagtgagaagaaaataaactatagaatctagccgcagagttatagttattctttattttagagtttgaaaaggagtgacacaaaacaatagtattgtttgtcactcctttcgtatggatgtttataaattttgtagcttttaattagcgtatgacagatacagaataaaccaatattttcatacagacattattttctgaatcaatttctactgtcagaatatcattctcccgattctttactgtagcaataattccacccattgtaataatttcatcaccaacctttattgcttcatgcaattctctcatttttttatttttcttttttcccggaatcacaattaataaataaataatcacaagtaaaatcaatacatataacataataatctgtatactcatattttcatcctgcccttactaagttttatttcaaataatcttctacaatttttacaaacatagcagatcccttgtaaagcacatcttcatctacattaaaatgtggattatgatgtgggatatctgtatgtttctctggatttgaagaacttaagaagaaaaatgctcctggtgctttttgtaaataatatgcaaaatcttctccacccatatttggtgccggtatttctgttacgacatttgtttcgccaacaacttctttcgctgcatttgtagctaattctaccatctcattatcatttgttactggtggtgcaccccagtcaatttcaacttctgcagcacctccgaaggtctttgctgtctgttcggaaatttcttttatacgttttgctaagtgttgtctaactggttcctcaagagcacgaatagttccctctatttctacaatgcttggaatcgcattatatgctactccgccatgaatcattccaatagtaatgactgctggttttactgctgatacttcgcgagcaataatttcttgaagggctatcacaatatgcgatgcaatattgactggatcaatccctttttctggtgtggatccatgacaaccatgcccgttgaccttaattgaaaatctatcataagaggccatacaacatcctggtacaataataacctttccagaagggatatccttattcataatactacctatatgttgtccaaatacagcatctacattatccatccccccctcttcaatcattacctgcgaaccttttgccaattcttcggcagtctggaacaaaagtctgactgtcccttgtagatcttctttatgttggttcaaaattttggctgcaccaagaagcatcgttatatgtgtgtcatgaccacaagcatgcatgaaaccatcatgtattgatttatagtctacatcattttcttcttggatttttaatgcatccatatccgcacgaagagccactgtttttccaggtttttctccttttatttcggcaataattccactatctttcgaagagcatttatacggaatttctagttcttctagtatcctgattacatatgcctgtgtttttggtaaatcaaacccaaattctggaatttgatgaaggtctcttctcgttttaactaattcttcttgtaaacttttacactctttccacatattcataatctaatcctcttttcttcttaagcgcttttctttcacatacattaatcgagcgaatccaagactgccaaatacagatacaacaattaaaacccaagctggtggactaagtaaaaatttcatagccagtgcaagaccaattccaaaaattgcaacttttggatattttaatgcatatgttccaaatgttcctccaaaaatcgctgccgctgcgtactttgttaacgcggatacaacaatatctggtaatacagatacaactacagaaccaatcaataccgctgcagttgttgcgattaagtttgtaatgattgatccgcaaatagccattgtagatgcaacttctgcctgtaaagttccaggttcactatctgtcgtttccaatgccatagttgcacacggaacacgcatatttccaatatttcctgataaaaaacttaagtaggttcctgttaaaccaagagaggcataataagaaattggttctacaatataaaatgctccaaatgaaagtgcaaccattccccaaccagctaatactactttaggatccggccaacagtcatattttaaacataaccaaattaccggaataaacgatgtaaaagcagctataatatttgttggagtaccaattcgaatactgttgcgtttccattctttcataaattctttattttccatatttacccccccctatgctccaagagaaatgtcatagataactgcgcatgccatcccaattagcatagcaattcctaaattgtactctcgaatcttcggaaatttcggaactactaatttctccaacaacatcattccggcaactccgccaacaacggcagctgcatttccccatccttttgcaatttcacttacgttaagatatccaaaaattccaatagaacatgctccactcataacaatcaaccactttggatctccgccactcatcttatttcttaatgtttcgagtgccggtgtaaagcaacctgttacaagaagccagccggctccattgagagccattacaaaccatgtgacagccatgacttctaatgtaaatcccattcctccgagttctgcgcctgcagcttcagctccaagcgttgcggctgtaagttctgtaggtgcagcaccgataatagacaatctttgccatgccattggtccaccgatagaagtcattaaaccaaccattacaataaatactcccaatgctggtcctattgccgaaatcaaccctacacgaaatgctgttttaggaacttcctttgggatatttgcttttactgtcattttttttgccattctgatatagagaaaggcttgcacaaatgcaatagctactgtgattccacaaagtgcatacacaatgattgaatttgatatttctacataatccataaattttctcctttcgttacatgatttgccggctcatgttttcatctaggaacagtatacagattaagtaaagagcttcctatgtatttataatataaaatattacatattttattagctgttattgtatttttttgtatataggatataattatattgtaatattttatatgttatatacaactaactttttatggatgaaaggagctttactgtgactgttgcagaattattaataacgccaactttaaaaaatttaaaactaatttctggattttatggtgtgcatcgcgaaatttcaaccgtaacagtaattgatacccctgacggttttcaatggttgactggaaatgaagtggtaattacaactacctatgcgttagaaaagacagaagaagctttttgcaattttatcacttctattattgtaaaaggagcaagtgctctaattgtaaaaacggatcgttatttaaaagttattcctgaaaatgcaaaaaagctttgtgacgaaaaaaattttccattaatttactgtccagaatcatatgcttttgctgatattatcaatcccacactttctagtatcatttccaagcaggaggcacaactacgaaaagccaacaatatacataaaagttttttagaacttgcaatcaacgattgtcgaatacaagaaattcttcaaacactcagtacattaattaaagttcccactgcctatgtggatacggttttccataaagtgtatttttcagatacttcaaacgaaaacactattttattaaacacgatgtcatataaacaaatcttgacatattttaaagaacattataaatatattgaagttgccaataagaaacaattttttggatttattattattctggattccaatatatcagagccaacaacagacttggagccaaacccagagtttgactcccatgtataccatactgctcttgaatatgcaagcattgtcattattctccgtatgcaaattttggttagtaatcatatgattgaggaaaaatatcgctcctcatttgttggtgatcttgttttaaataatgtcaaaaccttaaccgaaattgaaacacgagcgcatttatatggttgggattttagtgcaggtggttttattgtaattatagatatcaataattttaaaaaatattatttaaaagaattaagttccaaagaaggacgacaattacaaaactatgtaaattatatatttgatacttccattcaatatatgcatgcaacatttccaagtgctcattattattcccagagtgattatattagttttttaattggtgaaaaattatcttctgttgtacaagaaaaattaaagaatgtgtttcatcaaattcaatatgcattagaagttacggttccgtttactgtttctatgggggttggcacatatattgaaaatatcatagatatccatcatagttatgaacaggctcgacaggttattcaggctgtatatcaaacacatcaatttaatcgtattactttttatgatcaaattggactttataaacttttattttcagttgcatacaacaaagaagcgatcgaattttgtgataaatatgttcagcctttaagagaatatgatattcaacatcatgcaaatcttattgaaacgatacaagcaattgttaattgcggttggaacctgaaagctgcttcagatgcattatatttacattataattctgtaaaatatcgatttcagaaaatatgtgaaatattagatatggacctaagaaatcctgaaaaacatacagaagtagagttggctttaaaactttttttcttacaaaaagaatctcggtattagaaacacataagacaaaaatgccagtaggattggaaatagtcttttccctttgtatatgtccttgagttatggggaaaagtcagttaaaatgaaagaaaaatagatgttaacggtgttgaataggattgggaggaaagaagatgcttgcatatacatacaaagagcaggggaaatttatgttggaagaaaaagagaagccggttcttcaagaggaagaggatgcgatcgtccgggtaacgctggctagtatttgttcgagcgatattcatatcaaacatggagcagttccaagggcggtaccgggaattacagtagggcatgagatggttggcattgtggaggaagtaggaagcaaggtgaccaaagtaaaacctggagatcgtgtagctgtaaatgtagagactttttgtgggaattgctttttctgccaaaatggttatgtgaataactgcacagataaaaatggcggatgggctttgggatgcaggatagacggagggcaggcagaatatgtgcgtgtgccttatgccaatcagggattgaatcggattggagatgcaattacggatgaagaggcattgtttgtcggagatgtcctggctaccggatactgggcaacaaaaatttctgaaattggaagcgaggatactgtagtcatcattggcggggggccaacgggaatctgtacacttttatgtgtgatgttgaagaatcctgaaaagattattttgtgtgaggtggatcacgagagaattacatttgtgaaagagcattatccgaatgtgctcgtagtaaatccaaaagaaactgatgtcgaggaatttgtcagacaacacagtagacatggtggagctgatcgcgtgctagaagtagcgggaggaaggaatacttttgagctggcatggaaggtagccagaccaaatgccattgtgactgtggtggctctttatgaagaagaacagatcttgccattgccacaaatgtatggaaaaaatctcacgttcaagaccggaggggtagacggatgtgattgtgatgaaattttacggttaatagaacagaagaaaatcgatacgacaccgttacttacccatacatttccactaagagagattgaacaggcatatgatatttttgaaaatcgaaaagaaggcgtcattaaggtagctattcgaccgtagacaagaaaaaaatgatttctgctatcacggcctcttcgttaatgcaaagagaaatacaaatagttctgttgcgggatatgccagccagacaccggtcattccaaaacagtaagagagtatccatgccattggcattaaaacaaaaaagctgcggagtatggaaatgatctgtgccggaagcggatggtttatggaaataaaataggtcgaaagaacaatgttaaatccgataaacgggcaggcggtaaagtaaagttttaagccggggattgcatagctggctaaaatcaaatcttgttcgctgttaaaaacagaaacgagacggggtgcatgaaagaaaataatcccatatatcacaatggataaaaggatagaagttatgagggaatagcgcaaaagcgtttgcacatttttcttatttcctgccccatgattctggctgatcaatggctgtattccctgtgataaaccggtatacagggagattaccacaagtgaaatcacgctgatcacactgaatgctgcgacgcctgtgtttccagaaattctcagaataataaagttaaataaaaacatcacaacaccggaagcggcttccgtcagaaatggcggaataccatttgcaaggatgttgacagtagttcttttcatttgaacaagattcggaattgtcaaatgaaaagaattcttttttttcagaaaatatggaagcaatactagcatacttatcactggtgacagtccggttgcaagggcagccccgaaaatgcccatatgaaaagggaaaataaaaatgtagtctaaaacaatgttggaaaaacttccgattatcatagctgccatggaaagggaaggattcccatcatttctgacaaagcactgaaggaaatgatttaataaaaaagcaggagcaaatagcatgagaactttcagataacgatttgttgtttcaaacacctggatgtctgcacctagaactgttacaagatgctgggaagcaaatagtcctgtaaaaaagaaaatggaagcaaacaaaagtaccagcataagtccattggtaaatacttgatcagcagcgttggattcattacggcttttcaggatagaaaatcgggaactgcctccaataccaatcataagtccagttccgctgataatacaaaatacaggaaaagcaagattcagtgcagtgagcccgtttgtgccaatgtccgcagatacgaagaaagtatctgccagcgtataacaggaataagcaatctgccctaaaatattgaaagaaacatatttagaaaaatctttaaaaatagttttattcatatagcctccaaaatataaatggtaatttagacaaaaaacgctcccgaaaacaaagtagcctttgcattcgggagcgtttcaaaccgtggttacagaataacatagaaagggagaaagtgcaagaagtggatagaaataagtactttgatatgattctgagcgtgtttcttatttataaatcatagattaaattcgttctgcatatcttgtataaacaaattatacaggggtttctatgaaagattatatcgaagagcgtgctgctgcgatcgcgaattatattattgaagaaaatgcaacagtgcggcagactgcgaaaaaatttggggtaagtaaaagtacggtacatatagatgtaacaaaagaggcgtttttgtgaaggttgtttatgaggtgaggtaagagtctttagtgggggtaaaatctttacatgtaatatcctgtgttcaaaaggtaggatttaagcgaaaaaagcatcgtgaccatgaggaaatataaaagtaaaaagtattctatgataaagtataaaggcttagaggagaatgtctcttctaagtttttttaataagaaagcagtttaggcgtttgcttttgaagttataataagtgtagtaaaacttacaccagatggaacaggatactgtactaagatgatatttgttaaagagaaactattgatggatagaatgtcggatattcagttacgatttttcaatataggatgagaaagtttttttgatgaagtgtaataatatgtagtcatatgctttgtagaaaaatctgtaggaattaaaattttttgttttatggaaagattataattatgatatactgaaagaaaacgataaaatagaagttgtggaggtaatatgcttatgaaaaaatttctttctttgtttttgtgtcttacttgtgtgctgactttagttgcgtgtggaaaaaaggtagctcctattacgctacctcaaaccgacgagattacatctattgatataacttttggggaaaatacagtaagtcattcagacaaaacttggataagtgaaataatcgccgatatttccagttctgaaccgactaagaaggaaagtgttcaagactgtccacaagtggaaagttatatcaaaattgacttccagtttgagacaggaacaagtactatctttgcgtatgaggatagtggtaaatactatattgaacagccttatcaaggaatttataaaattgatagccaattattcgaaaggttacaagaaactgattaatttcagtttgttgagataaacgtgaatttgaggaaaagaagaatggaagataaaaaaatattacttgataatattaacaaaattcatacaactgaaatgggagttgatagaattaaaagaaatctaaaaatagatacagtagatgttgttgaatactgcaaaaataaaattgtggatgaaaattgccatatatacaaacaaggtaaaaattggtattgtgaaattgaaaatattaaaataactatcaattcatatagttatacaattattacagcacatattattaagtaaattataaccgaggtggaaatatggcatcaagcaaagaatatttagattttattttagggcagctatctgagttagaagatatcacttatcgagctatgatgggagaatttattatttattatcgtggcaagattgtaggtggcatctatgatgatagactacttgttaaaccagtaaaatctgcaattagttatataccggcagctcgttatgaattaccttatgagggagcaaaagagatgttgttggttgatgaagtcgataataaggattttttgacaggcttgtttaatgctatgtatgatgagttgccaaatctcaaaaagaaaaaataacaatcctagtttatcaaattaaaagagttaagataaatagaatttatggaggagacaatgatggataaaaagatacaaaaaataggagtgatttgttcaattgtgcagattatattaagcataatatgcttgatttataatgcgataaatcaagaaaatattataatttggatattattattatgttctggaatttttttgttaagctcgaatattagtagaaacaataaaaaagaagacgagtgaggaagtgtaaaatccagcttgtcgaaccgaaaaacactgtaataacatgtataaaagaaaatataaaacaccctactgagtaggttgaactaaatgcccctatgatttcaattttgaagtcataggggtattttttgtgcagaaaaataaaaaatttcttttttcaccctgtattttcccctctgagcctttcgttatatgagagaaaaaaataaaattcatttttatttgtaaaaacccctctctacgttctgatatatgaggaacaaattacatttgccttaaaagaatcgggtctgattcaagaacaaagaaaaaacgaaaagagaaaggagaaattacatgaacaaaacaatcttaatgggaagactgacaaaagatccggaggtgaaatatctccaggatgaaaacagtactgcaatggcaagatacacgctggcagtagaaagacgatatcgaaaggatggaaaggcagaaacagattttatttcttgtgttacctttgggaagaatgctgagtttgcagaacaatatctgaaaaaaggtttgaagattttagtaagcggacggatccagacaggaagctatgtgaatcaggaggggaataaagtttatgccaccaacgtgatcgtagaagaacattatttcgcagaagggaagaaactgtcaggagcagaaaagaaagaagataccgatccagatggatttatgcatcttccagacggagaagaacttccgtttgagtaagaaaaactcggatgctgaaagcagaagagcgcacttatataccttacaaggtatgtgcgtcctacggaagtagcatctttctgaaggagaattccgaaagtgtttgcggatgatccatccgaagaagggttccccttccggcagaaatgcctatcccgtaacagagaaaaaggaagaattgaaaaggaggaaaaatgatatggcgaagaaaaaaacatttcaggaatatactcaggaagcatttcttgagattgaaaaaacagaagctgcattgaaacaggcaaagcttgagaaggaacaggcagagcacaggatccagagatccttgaactatctggatacacagaaaaagaaaaaacgaaaggcacgaacccatctgttgatccagaaaggagcagccatagaagcaatctgtaaagataccaaatatctgaccgaggcggaattttatcagctgatggatgaacttcttcatgatcccgcttgtaagttttgtgatgtcgttcatgaaatggttcgtggacgggcggaaactgcagaagcaaaagaacgagaattagaagaagaggaagcactattaaaggcgatgcagcgaggtgaactgccacagggagatgagtaagatgggatgttatcactttcatctgaatcaattatccagaggaaaaggacagtctgccattgccagtgctgcctatcgggccggtgcaaaactggaatgtacttattacggggaagtaagtgattatacgagaaaaggcggtgtggtgttggcggagatccaccttcccaaacaggctccggagagattcaaagacagggagaccctttggaatgaggtggaatggatcgaagggaataagaaagcacagctggcacacagctttgacattgccttgatgaatgagttttctatggaagaaaatattgagcttgcaagaagatttgtagaagaacagttagtcgcaagagggatgatcgctgatctggcaatccatgatccgaagaaggcaaaggataaaattcccaatccccatatgcacatcatggttcccatccgccctttacaggaagatggcacttggggacaaaaacaaaaaaaggttccagtactgacaccggatggacagccggttctgaatcagaaagggcagccggtatttcgggcggtacatacaacggattggagtaggaaagaaaccttggaagaattgagaagtgcctgggcgaggatgtgtaacgaactgtatgaagaaaaaggacttacagaaagagtcgatgccagatcttatgaggaacgggggattgataagatcccgatggtgcatgaaggaccgaacgtacaggcaatggaagcaagaggaatttcaactgcactgggaagtttaaaccgacttatccgtgccttgaatgatatgaaagaacgggcaaagaatcttcttcaatggtcgttgtttcgacaaagccagttgatggaacggatgctgtccttccatcagccaactttagcggattatctaagaaactattatgacaagagaaatgcagtcgcagaatcctacgcttatggaacacaaaaggcgaagaatacgaatctgaaacaatttgcagagacgattcgctttctggaagagcatgatgtgagaacccctaaacagctgacagagaaaatccaggaattagatatacagttgaatgaggtgagtcagcggttgaatcaacaactgtctgctttgcgaagtgtcaacagcaatctttatgcaatgaaagagtattttgaaacaagacctgtttatctggaattaaagaagaaatattttggcagggaaaaattcaaagaggaacataagaaggaacttaacggatattatcgttcggaaaggatcttaaaagaaaatctggatgcgaatggaaaaataccagaaggaaaatggaagcgagaagcagattgtttatcggaagagattgctgctttgcgaaaagaagataaacggatccacgccatgttacgaaagtatgagaaagtcaaaaatcatgtggaagttttgatggcagagaaaggcgaaggtgtctctcttccagaaacaaacaagcgggagcaatccacagaaacaaaagaggcagtgagaaccatgaaacgaaagaagaaacatcatggaatggaattataggaggaattttagaagatggaagaatatacaagagaacagattcaaagagcagatgataccgatttatatgttttcctttctgggagaggagaacagttcaaacgatgtgggaaggaataccggtggttacgacatgacagtgtgatgatcaataagaatgaatggtatcgttttagtcagaataaaggcggtcatgccatcgattttatgaaagaattttacggtctttcttttgcagaggcagtcaaagaattattaggagaagagggagttggagaaacaaacagaagaacggcaaaggaagatgcaggcagacagaaggtctgccccatccccttgcctggattggaactgccagaaagaaatgaaagctgtgagattgcaaggaagtatctcattgaacagagaaaactatcggaacagctgatagatcagatgattgcaaagggggatatttatgaaagtaaaaactatcacaatgtggtgttcgttggaagagataaagaacagaatcccagatatgcagctatgcgtggaactgatgagaacagatatcgtggggaggcaagaggttcggaaaaagcctatggatttggccatataggaacggatgaaaaactgtttgtgtttgaatctcccattgatcttttgtcttatatcactgcagttccagaagaatgggaaaaacatagttatatttccctgggaggattgagtgaaaaagcaatgaaacggatgtatacagaatatcctcatatccattccatctacttgtgtctggataatgatgagcctggaaatgagagatgcaggaagtttgtttctcttattccggaggaactgagtgtgtaccgattagaaccggtgaagaaagactggaatgaatgtctggtagcagaagttccggtagaaaatatggcaaagcagatgtgttggagagatgccagggaaaaaccagttccggtcatgaaaatgtctgaggttgaggaaacggtggttcagtggttatggtatccattcattccctttggaaaggttactttgatccaggggaatccgggaaaaggaaaaacatggcttgcaatggcaatcgccgcatactgtacgaatggaaaagaacttcccaatgcacttcccatagaaccctttaatgtattgtatcaaacagcagaggatgggatagcagataccattaagcctagattagcaaaatgtggtgcagatatgacaagagtacgcttcatcaatgaagatgaaaaacagctttctatgacggacgatcggattgaaaaagccatccgccagaacaatgtacgcctcatgatcatggatcccatacaggcttatctgggagccaatgtggatatgaaccgggcaaatgagatccgtccattatttcgacatctcagtacgattgcagagagaactggatgtgccattgttctcattggacatttgaataagtcatcgggaagtcagagcgattaccgttccctgggatctattgatatcgcagcggcagtacgaagcatcttatttgtagaaaaggtggaaaaagagaaggaacaggatatccgagtggtatatcagcaaaaggattctcttgctaagaaggaaaatccggtagcgttttctttaggagaagaaggcttaaaatggttaggagaatacgatatatccattgaagatctgctgatggggaaagcaggaacgaaaaaggaaacaaaactggaaaaggcacagaagttgatcctggagttattgaccaaacgaaaagtaatgtgtttagaagaattagaggcagaactacttgcttatgggatttcttccagaacaggaagagatgcaagaaagcagctggaaaacagactgagctacgactggtgtcagggaagaaaaacagttgcgttgacaacagaataaaagatgacattggcaaaaaactactttggcattggcagtctttatagatacctttgccagccgccaatgtcagagtgattacgaatagatgatagttaaggtctattttaataggtattttcatagtaatggacaaagagaaaagggaggtgggagcaccgctatgaagaaacaaaaactgaattatcgttttcataatccaaatacagcggaagtgaccgccgattacatattaaaagtatttattgaggtgaatgcgaagaaagtggaacgaataatgcaagaggtggttgaggaaagttcggaagaggacaagcaggaagcgaaataaaattctctattcttaacgatgaaaaatgcagaaaaagaaattacaaagcaatatatgagagaaaatctcaaatatagtttataaaaactaaaaatagagtataataaagagtagataagataaaatctgaaatggaggtaacgatatgttatgtcaatttacagttaagaattttaaaagtatacgagatgagatgacttttgatatgcaggcggcggctatttcggagcatgaagataaagtgataatggataaaaatggagagcagtttttgccggtttctgcaatatatggtccaaatggtggtggaaaatcaaatgtcttggaagcattgcatactgtggcagcaaaagtgttacgcccgttgtatgcaacaggagataatgaggaacgtgtttttcttcagaaaaaattattgattgagccctttgcattttcggaagaaatgaaaaatgaaccgacagaatttgaagttttcttccgaacagaactggcagagtatagatatatacttcatgtgaaaagagaaattgttgtatatgagtgcctggatcgtgtgaaattggagacgggaagacgttcagctctttttgagcgaaatgcagaggaaacaatattaaagggtgtgtttgcaaaattaaagattagtgacgaactttctgaaacattaccattattatcttatttaggaattacctataaaaaaaatgaggtggtaaaagacgttttagaatggtttgaatacggcattgatttcctaaactatgggaatccgatcgaagaacttcgtatggcagtatcaaattcagaggatgtaaagcaattaatgttggatatgattcaggaaatggatttggatattgtggatttccgagttgtgaaagatgaaaatgatcgaattgatgtgtatacaaaacacatggtagagggatatgaagcagaactaaatttgtttgatgaatccagcggtacaaagaaattgtttgggttaatgccatttattgctgatagcttattatccggagcaacactggtaattgatgaactagatgcaaaaatccatcccgtgttattacgccatataattatgatgttcaatgacatgagtatcaataagaaaaaggcacagctgatttttacatctcatgatttatctacaatgaatagtgaagtatttcgcagggatgaaatttggtttgtggcgaaaggaaatgcacagaattctcaattatattctcttgtagagtttaaaaatgagaagggcgagtctgttcgtaaagatgccaaatttgataaacagtatcttgaaggtaagtatggtgcagatccatacctcagaagaattgtagattgggggaaggttaatgcctaagaaagccagaacagaagcgtggagaaagaagcgccgtcaagagcatttggaaatgaaaaaatacagatattacattttctgtgaaggtcaggaaacggaaccgaaatatttccaagggttcaaaaaatggattgaagaaaatccgatttacaaagacatggttttgattgaaatagagccttgtcaggcggagaccatgcgtgtaattggaatggcagaagaatatgtgaaaaagaaccgacttcaaaaagggcggatatgaagtcaataaatatactgataaaaatactgctttaaattagtatatacgattggctgtgttttatatatttattatgttagtttatgtagaatatgagggaaaatttaaaaaaatagcactcacctcttgacagtgctagtaatttggggtatcataaaaataccaagagcgctgttgtttatatatgtagcagccaaatatgagaatgtacttttacaatagcatagagttcgtgaaagaaataaaaagtttcctacatcgtattctaggcgtccaacaatcggatgtctttttttgatataagagataaaggagcaaagaaacatatttggcattagtttgattgtaaattaggaggatttttattatgaacgaagcagttatgagatcacaaggatatgcaataagtatggaacatgatatgagccgagtgttcggatgtgaaagatttggatttgctggtataatcaatagtgattttatcagaagaaatcctcttgcagcgatattagccacttgcggattcgtatatgcaagaggagatgatagcagtaaaaaacaagttgagaaatttatagaagatacgaggttttattgggaaatgccattggatgaacttttatcatttgaaacatctagtaagacggtggggataaaaacggtagaactagaatatgaaaatggcgaaaaagcgttagaagatattatggataagttcagtggtatatgtgacttagttcgatagttacttttttaaaattttgtaaacacaggctcagatattttaggcgaaaacctccagaaaaatctggaggttttttattaattgatattaaaaacctgattattcaagactacatgtcttttatgggaaagaaagatataatttttaacaaaaatctgtaagtcgatatctgatggaatttggacagttatatgttatacttaaaggatataaatatgttttgtttaagatgttaatatattatagaagggagaaagcacttatgccaaaagcaggagatagatttattgttgaaattaaaccatcacatttaggttggggaacacatcgttatacagatacacgtgatccgatttatggagaaggatatattaaaattccgagagaatatgcagttgcatttgaggtatttaatgataatcatacagtagcaaatccaagatattcttgtgttgcaataaatggttctttttcgggaattttacttgcacaagggtgtagcaaagctggagatatatacgcaaagcagtttgcacaagaaggtaatttaaaaggtatcggcaattggtatagaagtgttggtgcacaggttggaggacgtgttgaagtaatatttacttctgcaaatagtcttacgattgaatacataggatgaaaatatatagcagagaatgaatttgaaggtacttttcgtatataatttttattggagttgatgatttggataatcttacaagagaacaaagacataaaaatatgagaaatatcaagtccagagatacgagcattgagttgacattgcgaaaaaagctatgggaaaagggatatcgttacaggaagaattatgtcgaattacctggaaaaccggatatagctcttacaaaatataagattgcaatattctgtgacagtgagttttttcatggaaaagactgggaagttttaaaaccacgtttagaagctggaaataattcggaatattggaaaaagaaaatagaaagaaatatggaacgtgatgatgaagtaaacaaagccttgatatttcttggatggacggtaattcgtttttgggggaaagatattttaaaaaattgtgatgagtgtattcgtgtcattgaagaatgtatttttgatttaggtatacaagatgaggatttgtctgaataagctttcaagtaatagaaaaagaaaggcttgtcggttataattttaataaacagatagatggagatacaaaagatgagattgctatattcaaatatgcttcctatgaaattagaagatgagcaggaatcttttatagattattttcaggaagcaattcagaaagctgatgaaattgaaattgcagtgggctatgtgtcaaaggctgcgctaaaagaattagaatcattagttgacaagtttggtataaaaagaatttgtctgattattggaatgtattatcatgaaggaatgccggaaggtacatataatgttgctatggcattaaatgaaaactgggtagaaaaagaaatcggtgaggttcgtttggtaagaacctttaaatatcatgggaaagcatatatcttttataaagaaggagttccgtttgcaggaattattggctcacataatctgggagcaattaaattggaggcttcaaatcggcggcagtatgagttatcagcagttacagaagatgctgatgaattaaaagagttatcatcccacattaaaaatataatgcaggttaagtgctctgcaaacatatctgaattgaaggacattccattaattcgtgaagaaaacagggcattggtagatcaggaatttgtttcaaaagtgacaccggaagaagttgaagcttataaaaaacggctgacagaaatatcttttgagattcctttaaaagttccagaggatgaggaagacccatcgatgcgtgggtctaatataaatgtgtgttatgcaagcggaagaaagcgtgtatggtgggagatagaaatagtagtcggcaaatcaattagagagttgccaggatatccattacatcaaaaaccatttatggcaattacggatgatggatggaaatttcagacatggacgtgcgggcagaataacaagaatttgtactcaaaagatgatttgaaaataatggggcgttggataaaagggcgtcttgttgcggctggtctgatagagccggtgaatagagttgaaagtgatatagagggtaaaggtgtcattacacataaaatgttaaataaatatggcagagatacaattaccttaacaaaaacagatattattacaaaagtggaagatggaacagaattagaagtttggatgttgtcattccttccagaaagcaaaaaacaggaggagttcgatgagatatcttgaaacgtatttggagacaatagagaatagaggaaacaagcagttagcagaatcaatcaaaaagaccgtggataatattgctcctaaatatcttgaaagtttctctttttgtgatcatgaggttggtctgctttttggaaatgttcaatctggaaaaaccgggcaaatgtttggggttatttctgcggctgcggatttgggatttccagtttttctggttttgacgacagataatgtggttctgcagcaacagacaattgaacgtgttcgtgaggatttaaagggattctgtatttgtgatgagtatgattctgagatatttacggaaaactgccttatgctgcctacaattattgttttgaaaaagaatgtaagaacattaaaacaatggtctaatattttaggagctacaggttttatgaggggaaatccgctttttataattgatgatgaagcagatgcggcttccttaaatactttggtgaataaaaataataagtcatcaatcaatagatatttggatgagataaaagcaagatcggcctgcagtatttatttacaggttacaggaacaccacaggcactgttgctacagacaatgtcttccggctggcatccatattttacgtattattttaggccgggaaaaggttatcttggaggagattttttctttccacagacaggaaaaggagagtgtatttcgtatattgacacaatgaaaaatccacttgaagatgctttgctacaccatttagtggtttctggaattatggttactgcggggaaaaaagtgactaactttttaattcatcccagtgtaaggaaagcggttcatggaaagtttcagcaggaaatcagtaagatattagtcgaatataaagcaaactgcagaagcggagagcttattgaacagtttaagatacaatacgataagctgaaccctgttaaagttgagaaaaaagaattttctgtagttttggaagctgtgcagaatttattacttcgtgatgaaatcaaagttttaataatgaatgggaatgcatctgtatgtagtgaagattatgcaacaggttcaaatataattattggaggaaatacgttgggacggggagttaccttttcaggactccagactatatattatacaagaaccgcaaagaaaccacaggctgacacgatgtggcagcacagccggatgtttggatatgacagggattccgggcttatgggtgttttcattgacgaacatttgtataagctgttttcagatattaatgcgacaaataattccataatttctcaggtagaaaaaggtatggataatgtgaaaatatattatccagagggcttgaatcctacaaggaaaaatgttctggataataaaaaattatctatgatttcagggggaactaattattatccgtattcaccagataatgatacaatagctgatttagataaattactgaacgtttttgatgattctgaaccattttaccaagttaatcttagattaatgcgggagatttttacacatataaaatcaggggatgattttaaagtgggaaactttatttctattattgatacggctcttgcggagaaacctgcaagtcaaggcgtattaattgttagaagaaatagaaatgttgcaaagggaacaggtgcattgctgtcaccaaatgattggcatttgggagcatctgttactgacaaaatagttcttactatgtatcagatgacaggagaaaaaggatggggcggcaagaaaatttggattcccaatattaaactgccggaaaatctggtttactatgatgtttcagaaaacagcgatatagatgaggaaggtgtgtaatttgaaagaaaagagcatagagtattctgagttagcaaaaagaatattatttgaaccattacagctagatgtaaatagactatgcattgtatctggctatgctacgcctaatatggcatcttggatgattaaaaacctaaaggaatttaaagcgaaccccatagatttttcattaattgtaggaatggttccttttgatggactgagtatatctgttcatgaggggttcaaaaaactgcagaatgaaaatatgccatctgaaattgagaaatatcagtgcagttatgtttgtgattctgtaccagtacattcaaaagtatacatatggcttaaagatgagaagcctattttggcatttacaggatctgccaattttacgcagagtgcttttggaaaaggacgtaaagagtatatggtagaatgtaatccagttgaagcatatagatattattgtgaaattgaaagaaatactattttttgtaatcatgcagaagtggaagagtctattttgctctatccgacacatagtgttttagatatggaaaataagccgattggaagtttgtctggggaaggcattcagtctgtatctttatccttgctttcaagaaacggagaaacaggatcaaagtcgggacttaactgggggcaaagaaataaaagaaatagaaacgaagcatatattcctctgccagcaaaaattgttcgtacaggctttttcccgttaaatgaacagcattttactgtggttactgatgatggacatcagctcatactgcgggtacaacaggaaggggataaagctataacaacacctttgagcaatgcacagattggagaatattttagaaataggcttggactagccaatggggcatatgtttggaagaaagatttagaagcttatggacgtaccgatgtcacgttttataagctggatgatgagcaattttatatggatttttctgtacaataaaaccgaagcaaaaagctccggttttacaaaagtactactcattaatgttaggttctatgcttgggtaatcaacaccagcgaagcattttaatagtgcttcaaagatgatttttgcaccttggcatggaactgccattccaatttgttttcttacgctttctttgcttcccataaattcataggtgtctgggaatgtttgaagacgagcacgttctctgttggtcaaagcacgaggttcagcccaatgataaatgtgtgtgccgcctccgccgcttccggtaacagtataggctggtttttccgggtcaagtcttttgtaaatctgactgattttagcacctcggacatttaatttaagttcttctggaagatcagccgtaaaagcgttctgtccaggaagaatatgctccaatctgcggacaacagtggcagattgtcttgttaattcattattaagagcatcggaaggaataggcggttcttcaattgcttttctgcatgtattatcaatatcagcatatggtgctggggatggtacacggtatgaaacgttgatatcgtttcggatgccgacgataataattctatggcgtgcttgtggaataccatattcttcaaatttgtataagtgtggagttacagtatatccgtattttccggctttttttagttcatctaaaattttagtgaaagcttttccgtcatttgcgtttctaagtccaccaacattttcagcaacaaaccattgcggattgtagaggtttaatacctttacaccataagaatataaaggtccaaagacaccgtccatacctttctgctcacctacaacactataatcattgcagggaaatccgaaagcaagcgcatcaattgggggaagactagttaaatcgaattctcggatatctttatgataaacacttttgggattatcaggacaaatattgcgccgatatgtttcacaagtatttttatcatagtcatttgcccattgatggacgatcttataattatcatttccaatatcagcgttcatggctccccaggcaattccgccgggaccacagaataattctccaagtttaaaaatcatttttgtcctcttttctatttttgttaaataagtcgatttgtttttgtatattttctttttcttccagagccagatgacttacgcctttgaatacttgggtataagaaattaaatctgactcgtctaagtatccagccattttaaataaatctatggtgtttattccatatagttctgctaacagttttaagtgatatgcagacagccttttttgtattcctttttcaaaacggctcagtgtagaattggcaatatttgttttatcggcaacatccttaaggcttaagtttttctgctcacgtaatagatgcagatattctcttaattcgtccatagtctcacctcatgcaatgaatatagcatatacgctgcaaaaatgcaataacaaatataaaatcgctgcgatttagcagcgaaaagaaataaagaaggtataagctgttttgataaaatatataatcgaaattgttttgaattttaaacaagaaaaaatgtatattttttgaatcatggtgttgaaaatctaaaacatgagcatactacggatatacatggaagttagtggaagtccattttcatttttaattaaataagcgggcataaaataatacatcacggtaggacagaatggttagcatcgtttactggttggacgagaagcgtaggagcagatacggcaagaaaaatattatcaaatttacatttatatgatgaatttgcaaattattaggattttcttgtagaaaaggaagcaatgtatcaattagttgatgaatttagcggttcgctcaagagattaaaagataaatgaaagtagagtagtttgagatgggattaatttcaataattctttctttttttctttacgaatctttattttgatatataatatagatgtaacagaaaataaatttgatacagagaggtaacactatgaagatagcagcctattgccgtgtttccacagataaagccgaccagcttaacagcttagaagtgcaaaaggaatttttctccgaatacactcagcgtaccggagatgtcttagtaaaattatatgcagatgaaggtatttccggaacgaaaatcaaaaaccgcaaggaatttcttcgcatgatgtcggatgcagaaaaaggaatgtttgatatggtcgttgtaaaggatatttctcgctttgccagaaataccgtagatcttttacagaatgtgcgcaagttgaaagcgttaggtattgaaacacagttccttacagcgaatatgacaagcatgggaaacagcgagtttgttctcaccatctttggagcattggctcaggaagaaagtgcgaatacatctaagcgagtgaaatttggtaagaaactgaatgcagaaaaaggacgagttccgaacattgtgtacggatatgataaaacaatcggagattatttcaatcttgagatcaacaaagaagaatcgaaggttgtaaagcaaatttataagtggtacacagaggagggttacggtgctgccaaaatttccaatatgctgaatgaaaaggggtatcggacaaagagaaactgcaaatggagccagaatgccatctgccggattttgaccaatgagatttatacgggaaagattatcaatggaaagcaggaaatcagtgattttctgactggtcagagaagagagaaggatgaaacggaatggcttgttgtggaacgtccagaacttcgtattattgaagatgaggtgtttgaaaaagcacaggaaattcttcgtggaaggaatgatgcattcaatctgaatcatgagaggcaaagcaacaagtatctgttttctacattgattaaatgtaaagaatgtggctggtctttccgaagaacagttcgtacttacaaaaatacgtatgtgcgttgggtttgttccggaagaaatggaaaaggagcagatagttgtccaaataaaacagctgtagatgaagaagaattaattcaggttttacaggaatattttaatcgggttcttcagcaaaaaaataaagtgattgattatgttgtgaaggaatttcagagagtgtacaaagcaaaagatgaaaatgcagagtatgaaaaggaattgaatttgcagattgccagattacagagaatgcgccagaaatatatggatatgtataccgatgatttaatctccagagaagaattgaatgataagttgggtggtactcgtcaagaactggatcgtctggaaaatgaattgaaaatggtatctagcaatttgacaaaaggagatcagatggaaaaaatcttaaatgatacctttaagcagattgaggatattacagatgttcatgagatgaccaatgtacagttaaagagactgattaagaaaatagaagtagacaaagatggaaatgtggatatttaccttcgcttactaggtgatttgggattaaatgaaagcattttagtggaagacgaatgtgaaaataaaacagctctaaatagtaacgaccaaacataaagatgtaactgatcgtttgcttcaaattaatcctgtgcttgcagtgagtgcaagaaaagttctggatcagaataaatcagagcgtcatattcggggaggaatggcgacgagggaaaaatatctgcacattgcgcatagatattaaccgtttcggaaggcattgtaaaaatataatttctagagagggatattagaaaatcatctcctttaacacaattacggatgatatagattatttgtgagaagggagatgattttatgtcaggctacatacttttaagaagaggaagttccaaagtcatttaaatcttctttcagataatgaattgcgtcctccaggcgtttttggcggattgcgtctaaaattaaatcgtgatatttcatatcagccgggatattatagtggctccatttattccagtgtaattgtgcataggcgcgccataacatattcatacagcttttcagctgagcacaggcatagtcgttgccgccgagagaaagcagtgcaatgtgaaaatccatattataaatccaatgctccatgacatcctcagtattttttctgcagagagaagagagctcatcaagatgcaaaagctgtttttcagtgatagtgtcgaagcagaggcgcagcattccggtttcaagtaccattcgatattctaacattttttgtatgtcctcggaggtgagtgcgatcacttggtaaccacaccttggaatgttttttaaaacgccctcgtggcagagggcagtcaaagcttcacggattggtgacttgctgtaaccgtatttttgaattagtgaagtctctgtgataatttcatttgcacggtattcagaggaataaatgctgttcaataccgaatcatatacaatttcttttaaattctttttgctcataatgctcaagtcctttgttttgaataaatagtcttaatgagattccatccttatccatgaataaattggggaaatagatcgtgctataaaaccttgtgtttgcagtaagaaattatatcatgaatcacacagaacaaaaagagagaagtaaatatttatcagagatgattgtattttattttgagaaaggattcttgattgacgattaatcatattagtgatattatcagaagaaagagctggtatgactactgatatgatttatatcagtacaaggcagaaaaaacgaatgagaaggtagaaacaggaaaaatcacagttagaaaagaggatggaaatgaaccaggaattgtatcagaagtatgtagaaattttgaaaagcgagcttgttccggcgttgggctgtacagaaccgatcgctctggcgtatgcagcagcggtggcgagaaaggagctgggacagtttccggagaaagtggaagtgttatgcagcggaaatattattaaaaatgtaaaaggggtaaaggttccaaattccggaggaatgaaaggcgtagaggctgcggttatcttaggaattgtcggaggaaaggcagatcgagaactagaagttttacagagtatttctgaagaagaccgggaaaagacacggcagctttttaaagagggatactgtgagtgtaaattaaaagaagggactgcaaacctttatattgaagtgagggtatgggcatcaggcgaagaggcggcagttagaattgaacatgcacatacaaacattacaagaattgagcataatcaaaaagtggtatatgagaatgaagaaaaatttacagcacatgagctggataaatcttgtctgaatatcaaagatattacggcttttgcaaatgaagtgaagattgcggatgtgaaagatgtcctgatgagacagattgaatacaattatgcgatttcagaggaaggccttcaaaatacatggggagctcagattggaaagattatcagggaagaagaaggagatcagctgaagtggaaaatgatttccagggcagcggcaggatccgatgctagaatgagtggctgctctcttccggtgattatcaatgcaggttctggaaatcaaggaatgacttgttctcttccggttgtcgagtatgccaaagaaaagaggaagacagaagaagaacttttgagagcattgtgcgtttccaacttgattgctcaggatcaaaagaggtatattggcgctctttcggcttattgtggagtggtatgtgcagcggcaggagcaggcgcggcaatcacatatttatgtgggggagatgaagaacagattgaaaataccgtgatcaatacgattgcaaatattggagggatggtctgtgacggtgcgaagccaagctgtgcggcaaagatttcctctgcgcttcagtcagcaattttaggacatgagatggcaatgagaggcatccgctttgaagccggagatggaattgtcatggagaatgcggaagatactgtaaaggcggtcggctatatgggaaaaaatggaatgaaacagacagatgtggagattttgaacctgatgatcggaaagacaaaactttcataagaaacagcaggggaatagaaaagtactttcagaagtggattaggaatacctattgtgactatagtagagattccttttccgcttctttttatcagaggaagagaagagtgtcaagacagagaactatatgtaatgcaaatggaaggtgcagggaaaagagaggggaaaattaggggagagaaaaagagccttgtctgttatttttttcggacgtataataaaatagtcagatggatatctgataaaacacaaggggcggcagagagaggcgctgtactttgtggattgtcagaatcaggttgggtgttgcaagagataaatcgggactatgacaatacatatggcaggaggagatgagagatgaaaataagtaaagaaaggcagttgtttgataatagagcgctggttgcgttgatcattccgctgattatcgaacaatttttagctgtcctcgtagggatggcagattctattatggtggcgagtgtcggggaggcggcagtgtctggcgtatccttggttgataatatcgttgtactgcttatcaatattttttcggctttggcaactggtggggctgttgtcgcaggtcagtatcttggaaggaagagggaggaagaagcttgtaaatctgcgggacagcttgtgtggtttgtcacaatcagtgcggtgggagtgaccgcaattgtatatctatgcaagagttttattttacacggtgtatttggaaaaatagaggcagatgttatggagcatgccaatacgtatctggtgatcgtaactgcatccattccgtttattgctctttataatggaggagccgctattttccgtgcaatgggtgattcgaaaatacccatgatcgtgtccatgatcatgaacgtgatcaatgtgagtggaaatgcaattttaatttatggcttccactgcggaacagaaggtgtggcaattcctacactggtttccagagcagttgcagcgattctgatcaccattcttttatgtaattccaagagggtgctgcacttggaaaaaacattccgctatcgatttgatggtgcgatggttaaaaatatcttaaagatcggtgttccgaatggactggagaacagtatgttccagttggggaaaattcttgtattgagtctggtatctacttttggaacatatgctattgcggcgaatgcggtttcaaatgcagtggcaatgttccagattcttccgggaatctcaattaatctggcaatcattactgttatctcaaggtgtgttggagcaagggattatgagcaggtaaaatattacacaagaaaactgcatatcatcacttatgcatggatgatcgttgaaaatattattattgcgctgctgattcctactattttaagggtatatcatttatcggatctcacagcacagacaacggagcagattcttttgttccatgcagttgcagttgtgacgatctggccattatcattttcgcttccatgtacactccgtgcagcaggagatgtccagtacacaatgtatatgtcgatcttttccatgtggatcttccggattgcgtttagctatgtccttggaaagtacatgggattaggcgtatttggaatctgggttgcaatggtcattgactggattttccgcgccatctgctttgtgattcgatatctgggtggaaaatggaagcataaggcgacagtataaaatggcaaatacatgcaggattgatacaaaagaagtagattttttgggaaaatatggaagaaaagaagaaatgcaaaaggaaagtgatagtttaacttgtaaaacagcaaaacctactttataataatgacattggcaacagaacatcacagacagtttgcaggaaaaagagcaactgcagggaactgacaggcatgcaaatcaggaaatcttatagctaagaatactgaaagaagtgcgtgtcagaattgttatcaagagaaatgaaaaaacgcaaggaggaaacatagtgaaaaatgaaacagtcatcgttcttgactttggcgggcaatacaatcagctgattgcaagacgtgtaagagaatgtaatgtatactgtgaaatctattcttacaaaaaagatatagaagaaataaaagcaatgaatccaaagggaattatcctgactggaggaccgaacagcgcatacgaagcagattcaccgacatattccacagagttatttgaactggggattccggttcttggcatctgctacggatctcagttgatgatgcatttgctgggcggacatgtatgtaaggcaccagttcgcgagtatggaaaaatcgaagtgaatgtagatatgacatcgaaattatttaaagatgtatctgaaaagacaatttgctggatgagtcataacgattacatcgagcaggcagcgccagatttcaaaatctcagcctatacagcagactgtccggtagcggcagtcgaaaatgaagagaaaggactctacgcagtgcagttccatccggaagtacttcatacacaggaaggaacaaaaatgctgtccaacttcgtatacaatgtatgtggatgctccggagactggaagatggattctttcgtagaatcatctattcaggcaatccgcgaaagagttggaaatggaaaagttctctgtgcactttccggtggagtagactcttctgtagcagcagtaatgctctccaaagcagtcggagaacagctgacatgcgtatttgtagaccacggtcttcttcgtaaaaatgaaggtgatgaagtagaagcggttttcggaccagaaggaaactacgacctgaactttatccgtgtcaacgcacaagaacgtttctatgagaaactcaaaggtgtagaagagccggaaagcaagcgtaagatcatcggagaagaatttatccgtgtatttgaagaagaagcaaagaaaatcggagcggttgatttcttagtacagggaactatttatccagacgtagtagagagcggacttggcggagaatctgctgtgatcaaatctcaccacaatgtaggaggacttcctgagtatgtagatttcaaagaaatcatcgagccacttcgcgatttattcaaagatgaagtacgtaaagcaggactggaattaggaattccagaatatctcgtatacagacagccattcccgggaccgggacttggaatccgtatcatcggagaagtaaatgctgagaaagtaaaaatcgttcaggatgcagacgcaatctaccgtgaagagattgccaatgccggacttgaccgcagcatcggacagtattttgcaggtctcacaaacatgcgaagcgttggggttatgggagatgagagaacttatgactacgcagtagcgctcagagctgtaaatacagttgatttcatgactgcagaagcagcagagattccttacgaagtactgaataaggtaatgaacagaattatcaatgaagtcagaggcgttaacagagtcatgtacgatctgacaagtaagccaccgggaacgattgagtttgagtagcttgaaaaatcgcggaaaagcccataaataaaggctttgcggggtgtcgaaaagaccaaatggagtgcaaatggagtttaaaaattatttttttctcttgtttatattccagattcacctgcaaatttcgtgaaatcggttattctcataaaataaaattagagtaaatatgaagaacagtttgttttgattgaagtgattttcgtcaaggcagactgtttttttgttgcctgcatttagaaaacagataccacagaaaggttctttactttcgatgagcttaaactccatgacacagtaatcacactgatggagaattaaaaaacaagaaaatttgataaatttcggaaaatgatgtccgattttgcatctgccagtacagagtatatgaagagataaatattcaaaacacaggaggtactgattatgcagaataaattatttttaaaggcagccgatatatgtgaacttctggaagtaaaacagacatcggcttatgaaatcatcggaaatctgaacaaggaactggaagaacagggctacctgacgcttagaggaaaagttccgacaaagtattttgtgaagcgtttctacggagtagaagatacttgtgagattccacaggaagagggaaaggaatggtttcatgcgtaagagaaaaatgtatttatcagtggaagacattgcagaactctttggattatcagtttcgtttgcttaccgggtagtggaaagaatgaatgccgatctggcaagcaagaactattatgtgattctcggtcgggtgccaacccgctatgtagaggacaagatctatggtctggaacatgttgagcagtatttgaaggaggataaagcggtatgagtatgatgcaggaaaaaatgtatatggatgtggatgatgtgtgtgcaattcttggagtttcaaaaacttatgcatatagtctgatgcgagaatacaacaaagaattgaaggcaaaaggctatattgtagtagctggaaaaatctctacgaaattcctggcagaaaagatttatggcatgaaagtcgaggattagcaatgggggtttacaaagaaggaaaaaactggaaagtacaggtctattacaaagactggcagggaaatcggaaaagaaaacagaaaagaggattcaggaccaagggtgaagctaaggaatgggaaagagatttcctgcaacagcagagccagggtgtggatattgaatttggaaattttctggagatttattacaaagatatggatgtccgtctcagagaaaacactatgtacacgaagcgatatattattgacctgaaaatcaagccttattttgaaaagaagattctcagtgaaattacggtggcagacgtccgtgcatggcagaatgagttgctgacgtataaggataagaatggaaaaggatattctcctacttatctgaaaacagtgaactgccagctgactgcaatcttcaattatgcaatgcggtattataacctgcaggataatccctgcaggaaggcaggagcgattggcaagagtaaaggagaaccgaaggacttctggatgcaggaagagttcaatgcttttctggaaacagtaagtgataagccggagacaagaatggcgtttcttttgttgtactggaccggaatgcgtatcggtgaattgcttgcacttacttataatgacatcaatcttgaagagaaaaccatatcaatcaataaatcttatcagagactgaaaggaaaggatatgatcacgcagccgaaaactccaaagagtatccgtgtgattacgatgccggattttcttgcagaggaatttagggagtattgcagtcatttgtatggaattatgaaaaaggaaagactttttcggtttaccaaatcgcatatggaacattgtatggctaccggaatcgagcggtctggtgtaaagcggatacgacttcatgatctccgccattcccatgccagtatgctggttgatatgggggtggctccattggagattgcagaacgccttggacatgaaaaggtggaaaccacgttgaacacttattcacatctgtatccgtctacacagagtaaattagcaggtttgctagataagaaacatgaggaagaggaggaataagcgatggctggtgacagacatggaaaacacaacacaacgaccatttcttttcgggtgaattcttatgaaaaagcaacaattgaagaacgagtgaaagtgagcggaatgaaaaaacaggattatatcgtccgatcatgcatttacaatcatgtatgtgttgttggaaagaaagaaacaattgagattatccggtcagaaatgaaggaaatgagtttggttttggaggatgtggcaaaagatttgaagtctgaaaaaccagttatttcagaaccggttcttgatagtatgacagaacggtatcttgcatttttggaagcagcattatggatgctgaaaggttcaagttatttatgggaggataaaaaggatggaagagaaagtaatgaaggattgtaaagtgctggcattgtgttcacaaaaaggcggggttggcaagacaacaagttgcgtgaatctggcagtcggacttgcaaaagcagggaagaaagtgcttgtgattgacaatgatccgcagggaagtatgacagcaagtcttgggtatcataacccagatgaattaccaatcacactggctactattctgacaaagattgtagaagatgaactatttgaaaatacactgggaattttacatcaccaggaaggaattgatttgattccggcaaacatcgaactctctggaatggaagtttcacttgtaaatattatgagcagggaacttgtcttaaaacaatatatagaaagaatgagagaagaatacgactatatattgattgactgtatgccatcacttggaatgctgacgatcaatgcacttgccagtgtcgatgcagttattatacctgtccaggcggcttatcttcctgtaaagggtctagaacagctgatacggacgataggaaaggtgcgaagacagcttaacaaacaactgaaaattggaggtatattgatcacaatggtggataaccgaacgaactatgcaagagatatatctgatctgatttttgatacatatggaaaccagattaagatttttccacagagtattccattttcagtacgagcagctgaaatcagtgcggaaggaatcagcatatttgagcatgatccaaaaggaaaagtagcggctgcatattggcagatgacacaggaggtgcttttggatgaaaggtagaagtgcatcgaagataaaactgacatcttatgatgaattacttggaggaggagaagaaacgaacgatatccagcaggtttcacttgagcatttacattctttcgagaaccatccatttcaagtaaatgatgatgaggcaatggcggaactggtggaaagtgtgaaagaagagggaattcttacagcattactggtacgaccgctgggtgatggtgaatatgaaatcatcgccggtcacagaaggagacatgcggcacaacttgctggtcttaaagaggttccggttattatcagaaatatggatcaagatacagctgtccgtgcgatggtagacagcaatctgcagagacctaatatactcccaagtgaaaaggcatttgcttaccgtatgaagatggaagcaatgaatcatcagggaacatcaggcggtatcagtgcgaaagacattggaaagaacgcaaatgacagtgcaaggcaggtgtatcgctatatccggcttacttatctgatgaatgacctattaaacgcagtagatcgtgatgtgatcggattgcaggtaggtgtagagctttcctaccttacggttccagaacaggagatggtggaggaagtgcatgagagtaccggaaaatatccaagtctggaacaggcaaaaaaaataaggcaacatcgagaagaaaaaacgctgacaaaagagattgtgcggctcctggttataggagagcgtaaaaagaaaacaacggtaacattaaaacaggatgaaattaagaagtattttcctccagagtatgatgaacagaagatacggactgttatatgtcagcttttggaggaatggagcaatcagaatcattgataagtacgaagggagggatgtgtcatgagtataagagcaacattccattattttcaaggaatggaatgcgatatgtacagtttttatcgtattcccaaactgctgtttacaagtgaatattttaaaaatctctcctgcgaagcaaaggtgctgtacggactgatgttagaccggatgtcactgtccatcaagaaccggtggtttgatgaagaggacagggcatatattttcttttcggtggaagagattatggaaatgcttaactgtggcaggaataaggctgtgaattgtctaaaagagctggatcaggaaaaagggattggattgattgagaagaggcgaatcggacttggaaaaacaaatgttatttacgtgaaaaatttcagcctgacagaatatccagatgagccagcaatctttgattcggaagaaacaccggaaaatgtagcagagagaaaagaaaatacagagacagaaatagaagaatatgcgaaaaaagagccggaaaagcccgtaaatacacagaagtttgaaaaacaaacttcaggaagtttgaaaaataaacttcaagaagtttcaaaaacaaacttcaaggagtttgaaaaacaaacttcaagaagtttagaaaacaaacttcaagaagtttcaaaaacaaactgtaataatactgaatataattatactgaatttagtgagaatgaatcttatcaatatctatctgaacaagagaaagggagagataggatacaggagagaaatgagtatcgacagttaattcatgataatatcgaatatgagatcctttgtcagagctatggaactggacgagtagaagagctggtagagctgatgctggatgcaatatgttcgacaaagacatatcaacagatcaatggggaagctgtgcctacacaagtggtcaagagccgtttgctcaaagtcgggtatgaacacatccagtatgtgtttttcagtcttgacaggagtacaagcaaagtgaagaatatccggcagtatatgctgacggtattgtataacgctcctgcaacaatcaatcagttttatgatgctgaagttcgacatgacatgtactgggggaaggatattccagacaggtaagaactttgtgcccactgggcacgaagtttaaaaagagatagtcatatctggcagatatgctaaaataaccttgtgtccactgggcacaaagtaggaggaagaattatgttgagatttatgataaaactgccatttcgaattattgcagctcctgtttggctggtacttgcagcggtgaatattgtgctggtgttcctggttgggttatctgctggattctgctatctgatagccggaatctctgttgtgacagaagttttgagtattgggtttggaatcagtacggactggacaatgaaatcagcgattattacgacagtagtgtttgttctactcccacatatcggtatggggatagttgcagtaattgaagttgtgaaatgtggattacaggaatttatttttggatgattgtggaaaatatagtggcgctatatggaaaggcagaaataaacaatggaagaattatataaagtgatggatgatttgcttgaggtggaatttcagatgaaagcagggatggatattctgaaagaactggaagagttttatatgctggaaaaagaaaccgaaaaatcggatgctagaaaagtagctgtgctgatgaaaggatatctgcagtcgatgaagtcaaatattcgagaaatcattcgttatattgatgacacgacacttgaaaaatcaaatgataaaaagaaagataaacaggaatctgcgagcaccatatccgaggaagtgcaggaatttgtgaatctgacaattacagagcatatggggaaagcatattcagaatggaagttaaagcaggataaagagccagtaagtgagattgataagaaataccagaaattactggaaacgttatcccaagaacaggaagaagtgattacggaatactgtaatgcaatttttagcagtggagcagaaacagaagaatttttctatcgactgggattaaaagatggactgaatctgaaaaatacggtaaaatctgtattagaaatgatatcatgaaatcggaagttggaggatacacgcatgaaaattgtaatcattaatggaagtgccagaaaaggaaacacgctgacagcaatcaatgcatttataaaaggagcatcagaaaagaatgaaattgaaatcattgaacctgacaaactcaacattgcaccatgcaagggatgtggtgtctgtcaatgctctaagggatgcgtcgataaggatgatacaaatcctacaattgataaaattgctgccgcagatatgattctttttgctacaccagtttattggtggggaatgtcagcacaattgaaacttatcattgataagtgctactgccgtggattgcagttaaaaaataaaaaagttggcacgattgttgtaggcggttctcccgtagacagtatccagtatgagctgattgataagcagtttgactgtatggcaaaatatctttcatgggatatgcttttcaaaaaatcatattatgcaacagccagagatgaacttgaaaaaaacaaggattccatgaacgaacttgaggggatcggaaaaaatttataaagcacgttccaaattcctgtttgcatatttcatcaaacggtacatattaaaattaacacaaagggagatgttagaatgaaagctcatgaatattggtctgtcggagcattgataacgatgctaggaactttttatagcggatataaaggttcaaaatcaagccataaatattttgcggcaagttctttgctttgtatgattatggctatttacacaggtcataagatgatatctaaaaacaagaaaacaaagaaagaaccaatatcattaggaaatgaagaataatacaatcaaccttgtgcccagtgggcacgaagttggcatagtcactatggtgtcaggagaaatcctggcatcttttttttatatctttttacacttcaaaaaataatttcaaaaaatttctaaaatcatgtccgattttgtcgctcccaatacagagtatatggaaggcaaattgaaaatcctctgatttccaaaaatcacaaacgtaaaagaggttcagacagttcttccgattgcaccttgacaattgaaggagctgatacatcttgaggaacatgcttaccggagataatccggctcgtgcaggcgaagactcctacgggaagagcgaagcaataatgataccaccgaagggtacaggacctctgctgaaacagagactgtgactgtatttttacagccgggttatctggaatgataacgatcagatgtatatgtacagacaaagcccaaatgtgaatacttagattttcttatttatattacaggagaaatcctgtagcaagtggggaatggttcgaatccattcctcattttttcgtgcagaaaatgcacagattattatcctgtttgaaataccagggaagggtgttgcaggaagaaagggaggacaaaaagaatgaatacgattgttttaatgggtagacttgccagagatccagaaactaagctgacatctacgcaaaagggacaaaccaaagtatctaggtttccactggtagtaaaaagaaatcgcacaagcaaagcatttgtagtgatgatcacagcttatggaaataatgcagaatttgtggagaaatatcttgaaaaaggaattaagattgctctttccggagagttggtaatctctcagatcaaagatgaacagactggaactgcatcctattataccgaagtcattatggataatgtagagtttgcagaagccaaaacaaaaaaagaagaatctgacggatttcaaccagcagagaagaggaagattccattcgatataccagaagaacttgaacaagaaatgccatttcgataggaggacaagatttatgagaaaatactttttagaattatttgcaataggattggttgattcagaaggaagaatcaatacagaacatatgacaagtgatgcgcttatgactgccatgaaaacaatggaagagctgacgcaaatgaaaatggatcgtttggttttggaaacaacaatggagatgatcttatgtatgtttgagtcatgtgacacagaggaatttacagaaatattaggcaagctgcttggcggaaagcagacttctaaagtgacagctcatttggaagcactggaggaattgttgacagaagaggaatatagtagtttccttgcagaatatcttggttatttaaccgtgaatgtagcagagtttattaggagcacaatcattgaaaatggtttgatgttacttgccggttcaggaggagaagaggatggagaagaggatggagaagacggattataaaatcacagagtttcacaattcggagtttggttccatccgtatgattgaagatggaggcagacttttattttctggaattgatgtagcatttgctttgggatatgcaaaaccaagaaatgcgataaatgttcattgcaagggggccctgaaacggggcgtccttacatcaggtggggtacagccaatgatttttattccagagggagatgtatatcggctgattacaaaaagtcgtttaaagtcagcacagaattttgagaagtgggtatttgatgaggtacttccggctattaggaaaacaggcggatatttagagaccgatcttttagacagggtaaaagataacccggaacttcttttggaatttgccgagagacttttggcagaaaacaatcgaaatcgagaattgcaaaatcgtgtaaaggatatgcagccaaaagcagattattatgatcatttcatgattacaggagaatgcaccaatattcgaacgacggcaaaagagattgaatttccagaaagaaaatttgtgaaacttcttttaaatagaggatttctatataggagtccatccggcacgctgttaccctatgcggtggagaagaacaatgatctgtttattgtaaaagactattttaacaatggacatcttggttcacagacattggttacaccaaaaggaaaagaattttttaaagcgttgtgtgcggaggaagagtaaagaatgaaggaggtggttgccatgattacagatctggacagcagttaaatcgctgaaaggagggaaaatcatgcaggaagaggtaactcagaaaacggtcacgttctgcattcggactaccaaagtaacagcagatttattgaaaaaggttcttgctgcttatctgcgtcatcagaagcagaaatcggtagagaagaaagcgaagaagaatcagccgaaacagggaaaggtcacggtaaaagagctggcaaaacaaaatgccgggatggtcaatatcgagatcacaaataagaatatcaagtcctttgaacgttatgccagaaaatacgggatcaattatgctttgaaaaaagataagagtaaagatccaccgatgtatctggtgttttttaaaggacgtgatcaggatgccctcaatgctgctttccgtgagttttcccagaaacagattcaaaaagcgaataagccttctattcacaagcgtcttgcaacttacagagcaatgatgccaaagaaatcgaaggacaaagtaaagaaccggcatcaggagcagagccgatgaaaaagcaaatcggtaaaaatctgatgcaaaaatggaagaataagatcagggtcaggctgtccgccctggataaaaagaaactggttcttaccaatatcccatatatcttaactgctttttatacaaatcgggcatcatttctttacagaaacagtctgggagaagatattgggaacaagctattatatgcgatggaacatgcagacaggattcttactggattgcagccaagttttaactggcgtgatatgctgacaggaattgtagcagctgtcattctgaaattactggtatggcagaaacagtcagatgcaaagaaactccggaaaggaatcgagtatggttcagccagatggggaaacgctgaggatattaaaccttatatgtcggaagatccctggatgaatattccattaacagcaacagaagcattgactatggaaagtagacctaaacagccaaagtatgcaagaaataaaaatatagtggtcattggcggcagtggttccggaaaaactcgatttttcgttaagccgtcagtcatgcagatgaactgttccatggtcattacagatccgaaaggcactctgatcgaggagtgcgggaagatgttagcaaagggaccacctaagaaagataagaatggaaatattatgaaagataaatcaggaaaagtggtacacgaaccatatgtgattaaggttctgaatactatcaacttttccaaatcgcttcattacaatccatttgcttatatacggtctgaaaaagatatcctgaagctggttacaacaattattgttaataccaaaggcgaaggggaaaaagcttccgaagatttttgggtgaaagcagagaagctgttgtacacggcattgattgcttttatctggtatgaaggagatgaagaggaaaagaatctgaatacccttctggatcttttgaatgaaagcgaaacccgtgaagaggatgaaacttaccagaatccagtggatatgatgttccaggaactggaagaaagagatccgcagcactttgcggtcagacagtataaaaaatacaaaatggcggctggcaaaacagccaaaagtattcttatttcctgtggtgcgaggctggcaccatttgatatagcagaacttcgtgagatcatgtcttatgatgaaatggaactggataagattggggacaggaagacagccttgtttttgattatgtccgatacagatacaacctttaactttgtgattgccatgttacagtcacagcttttcaatctgctttgtgacaaagcagatgatgaatatggtggaagactgccagttcatgtgcgtgtcattgctgatgagtttgccaatattggacaaattcctcagtttgacaagctgattgcaaccatccgaagcagggaaatctctgcttctattattttgcagtcacagagtcagctaaaggcaatgtataaggatagtgcagatactattctgggtaactgtgataccacactatttcttggaggaaaagagaaaactaccttaaaggaaatgagcgagcttctgggtaaggaaaccattgacctgtataacacttcggagacgaggagtaatcagaagtcttttggattgaattaccagaaaacaggtaaacagctgatgactgaagatgagattgcagtcatggatggaggaaaatgtatcctgcagatccgtggtgccagaccatttttctcggacaaatatgatatcacgaaacacaaaaactatcggcttcttgcagatgaaaacgagaagaaccggtacaaagttgagaaagagttaaatccgcagtatacaccgaaatctgaagaagaggtggaagtaattcatgtagaactgtcggagtaaccttgggaatgaacagaaaataatgaggaaaggaataactgacactaggtgcaccggctttttagtcggtgtattttcgttcccgtaaacacctgaaagaagtcagttttggtgaatgtatatggcattttttagcagtgcaattacaactttaaaaactcttgtagtcgcaatcggcgcaggtcttggcgtgtggggtgtcgtaaaccttctggaaggatatggaaacgacaatcccggtgctaagagccagggcatcaaacagctgatggctggtgccggaatcatgctgctgggaactaccctgattccacagctggcaacattgttctcttaagaggagtggtagatgaacaccatcattgagagaattacggaagcgataaaggatatcctgatcgggcttatcaagtcctgtttggataacatgttcacgtctgtcaatgagcaggtgggaaccatagccgggcaggtgggacagacaccgcagggatggaatgccggaatcttcaatctgatccagaacatttcccaaacggtgattgtccccattgcgggactgatcatcacatttgtcctgtgctatgaactgattacgatggtaacgcagaaaaacaatttccatgaatttgagacttacaacattttcctctggatctttaaggcgtatgtagccatttatctggtgacgaatacgttcaatatcacgatggcggtctttgacgttggccagcatgtggtcaacaatgccgccggagtaatttccggaaacacagcagtggacgcatcggaagcaatcacaaggattgtggatgcactggaagatatggaactgggggatttgttcttgttatccatggaaacgctgctgatcagtattaccatgcggattctgtcgatcattataaccgttattttatacggaagaatgatagagatttacctttatacttccatagcaccaattccgtttgccaccatgaccaataaggaatggggcaatatcggaaacaactatttaaaaggcttgttcgcactggcatttcagggattcttcatgatggtctgtgtgggaatttatgcagttttagtaaatgcaatgaccatatccagtgaccttcatgcagcaatgttttcagtagcggcttataccgtgattcttgcattttcattattcaagaccggaagccttagcaaatcaatattcaatgcccattagcgggcaggaaaggagcgcataccatggcgtatgtaccagtaccaaaagaccttaccaaggtcaaaacaaaagtagcgttaaatctgacaaaacggcagctgattttcttttcacttgccgcagtagtgggaattccgttttatctgttcatgagaaaaccaatcggttccagtatcgcagccatcctgatggtaacgatcatgcttccatttttcttcatggcaatgtatgaaaaagacgggcttccctttgaaaaagtggtggcaaatatcattcgacagaagtttatctgtccgtcagtaagaccatataagacagaaaatttttatcaggagatttccacccttgtaaaaaaggagggtgtgccggatggcaaaaaagacaaagcaggaggctcagcaggagcgtctgtccctggtggaaaaaagaaaccgtcaggaaagaagaaacaaaaaaagcagaaaagaaagagaacaggaaaagcgtaggaagaagcaggaacgggaccgcaggaaacagaaaaatattcctacaactgcgcagcagagtattccgtatattcggatgctgcaggatggtatttgccaggtgacaaagaactttttctccaagacgattcagttttatgacatcaactatcagcttgctttaaatgaggataagaccacgatatttgagaattactgtgatttcttaaattactttgattcttccatcagtgtgcagctgtcctttatcaatcagcaggtggatgtggcagaatttgagaaaagcattgacattcctgatcagaacgatgacttcaatgccattcgtgatgagtaccgtactatgttgaaaaatcagctttcaaaaggaaataatggtctggtgaagacaaagtatatcacttttggaatcgaagcagaaagcctgaaggtggcaagaccaaggcttgaaagaatcgaaacagatatcttaaacaactttaaggtcctgggagcacaggcacattcactaaatggtctggaaaggctggagattctatatcatgtgttcaaccaggatcggattgaaccatttaagttccagtataagatgctgccggaaaccggattaaagaccaaagattttattgcaccgacttactttaacttttccaagaatcagacatttatgatgggaagaacgatggggagtgtgagttacctgcagattcttgcaccggagctgacagaccggatgcttgcagacttcctggatgtggatgacagcatcaatgtcaacattcatatccagtccattgatcagagttcagcaatcaaaatgatcaagagcaagatttcagatctggataagatgaagattgaagagcagaaacgggcggtacgttccggttatgatatggacgtgcttccatcagaccttgtaacctatggagaagaggcgaagaacctgttggaagatctgcagtccagaaatgagagaatgttccttgtgacatttctggtaatgaataccgcaaagaagcgtcagaagctggataataatattttccaggtgcagggaattgcacagaaatataactgttctttaaaacaactggattatcagcaggaagcagcactcatgtcctgtattccactgggagtcaatcgaattgaaattcagagagggcttaccacatcttcaacagcgatcttcgtgccatttacgacacaggaactgtttcaggaaggggaagctctttattatggattaaatgcattatccaacaacatgatcatggttgatcggaaacgtctgaagaacccgaatggactgattcttggtacacctggttccggtaagtccttctcagcaaagagggaaattacaaactgcttcctgattacggaagacgatatcattgtctgtgatccagaagccgaatattcggcacttgtgcaggcactgcatgggcaggtagttcgggtttcgccagtatctgaccagtatatcaatccaatggatctgaacctgaactattccgaggaagataatccactgtcactgaaagcagattttattctgtctttgtgtgagctgattgttggaggaaagaatggactggagccggtagaaaagaccatcattgaccgctgtgtacggttagtatatcaggaatatcttgccgatccagtgccggagaagatgccaatcctggaggatttatataaccttctgagaaaacaggaagagccggaagcacagcgactggccacttcgttggaaatctatgttacaggttctctgaatgtatttaatcatcagacaaacgtggatatcaataaccgcattgtctgttttgatatcaaggagcttggtaagcagttgaaaaagatcgggatgcttgtaatccaggatcaggtctggaacagggtaacgatgaaccgttctgcccataagtccaccagatactatgtggatgagttccatcttctcttaaaagaggaacagactgcagcttatagtgtggagatctggaagcgattccgtaaatggggtggtattccaactggcatcactcagaatattaaggatttgctgtcttccagggaaatcgagaatatatttgaaaattcagattttatttatatgctgaaccaggcttccggagacaggcagattctggcaaaacagctgaatatctcaccaacccagctgtcctatgtaaccaacagtaatgagggtgaaggacttctgttttatggaaatgtcattatcccatttgtagacagattcccgaagaattccctctataaaatcatgacaacccgcttggaggagacttctgaagcaggttaaaacaaaggagaaaacaatgttacgagcaatttcatatgtattaacttttagtggcggtgctgtttttggcatcgcttttctctgtttattacaggcagggaaagggtatccgaagaaggaggagtaatcagtggcagaacagagaatgaaagtcagggacaagaaagtccagaagatgaccaaggatggtctggtggaagaaaacctgacagataaatcttctgttcgtgtcagtaaccgtgtcggtgatgtgcagatgggaagaaaacagggggaaaaagaagaaaaccttgtggataagtctccccgccagtctgaacggagtgggaaaaatattcgaccctctgtgcaaaaatccagagatgcaccggaactgatacggacagagaagcaaagtgaggattttggacagagtagtaaacagcaaaatagaaaaagaatccgtgctgaagtcggaaaagaatccagacttgcagaagaatccgaagccggacagtcagggagactgaaagaaaaacgtgctgatctatcagaaaacagaggagacagccggagaaatcagacaggtggcagcaaaaagccaaaacaaaaacaacgtttgaagtttgcttatgaggaaactggtgcttctgtgaaaaatgacaaagatatggagaaattgaaccagatggatacggatggagtcaatttccgccatcagaaacagaaagaaaaagccaaaaagttttcttatgaagaagcaagaaagaaaaaggaagcaaagcagcattccaagaaagcacaggtctatcaggcaaatgaaggagaaactcctggaaagaaaaaatcccgtttgaagtttggtgaaggggaatctgtgaaaacagaaaaaacttctgttgtcaagaaagcaggaagtgcaacttccgtagcattgcaccgtgagatcagcaaaaatgaagacgataatgcggcggtagaaggtgcccataagttagaagaaagcggcgaaggtgtttaccggctggaacagagaagtgccagacgcaggaaacagtgggcatccagaaaaagaagcagacttgaaagacaggaagagaaacaggcacaggctgcatcccatcaggagcagaagaagctgaaaaaacagattcagaagcaacagatcaaatgggattatgccaaagcgaagcgaagtgaacagacagtaggaacagctacaaaaggtacgattgattatattaagaagattggcggtaaggtcaccaacttctttaaagaaaatcggaaggtgtatatcagtgtagcagttctgatcggattgatgtttctgatcataacgaatgtcacgtcatgttctgcagtgtttttacaaaatgtaatcacttacacagggaccagttatctgtcatcggatcaggcaatccgggaagcggaattgtattatacacagctggaagctaatctgcaggagcggatcaacaacatggaatctgaagaaccgggacatgaggaataccgatataacatcggacctattgagcatgatccgtttatcctgatcagttatctgtcagcaaagtatgaagaatttacctttgaacaggtaaagccagaactggatgctctttttgcattgcagtatcggttagaaacagaagcagtcaatgagactgtgacagagacagcaactgtaagagttggagaatctttgggacaggttgtgaccagtgggtattgtaactgcccaatttgttgtggtatttggagcggaggaccgactgccagtggagcatatccaactgccaatcataccttagcggtagatgcttccaatccgtttgtaccaatgggaacaaaggtagttatgaatggtgtcgaatatactgtagaagataccggagctttcgcaagatacggtgtacagtttgatgtctattatgacagtcatgcggcagcatctgcacatggacatcaaacatgggaatgttatctggcagatgataatggaagcaatgaagtggaagtgaccaggacaagagatgtagatgtgctgaatgtcaccttaaatagtggaaacctgatgtcaatctgtcaggacaggttgggatttttccagaaagaactgttcagtgcctacaacgatacaaaaggcaacttgcagatgtttgcaacaccggttgattttaactggtattccagtgtgaccagctattatggatacaggattcatccaatatcaggagcaaatcagcttcataatggtatggatatcggagcaccggaagggacaaaagtaatggcagggctgaccggaacggttacaacttctgcttataacgacagctatggcaattatgttgtgatcaaggacagtaaaggctatgaactgcggtatgcacatttaagcagccggagtgtatctgcaggagcatccgtcacgaaaggtgatgagatagggcttgtaggaaatactggaaattctacaggaagccatcttcacattgaacttctgaaaaatggagagcggttaaacccgatcttttatctggaaacaggagaaggggcaggatttggcggcaatgaatataccagtgaagcagcacagcgtttgttaaatgaagcagcgagatatcttgggacaccgtatgtgtggggtggatattcgccaagtggatttgactgttctggattcgtaagttactgcctgacacattcaggtgtaaggaatacaggaagattaacggcacagggattgtatgacatttgtacgccggtatctcagtcagaagcacagccaggagatctgatcttctttacaggtacttacgatgcaggagttccggtaacgcatatcggaatctatgtgggcaatggtcagatgatccattgtgggcatccggtgcagtatacgtccatcaactctccatactggcagagtcatttctatggattcggacgatggtaaggaaaagggcggtgtaacagccgtccggaaaggagaagcgatgaaaagtcttgaaaaagcaacggcagattatgagaaagccaaggaaaaaatggaagcatccaaagccagatatgaagcagatttaaagcgtttcaaggctgcggagatagcaaaaacagaagcggaaaatctggaaattgtaaaaattatccgtgcaatggatatgagcattccagagctggaagctttcaaaaagagaatgaaaaatgaactgcccggcagggtagaaatacagaaggaggaaacaaggtctgatgatgaatttagagaagatgaaacagaagaaatctaaaaatagcgtgaaaaaaggattgcttgcggcaacaacgattctttgcttgacatcgcctatgttgcagacacagagtgtgttagcggcagagaatacagcacccgcaattacgattgaaaagccagatggctggagacagggggaaacggcagtcgcaattactgtggatgccagtcatatgccagaaggattttctatcacaaaaattgaagcgaaagctgggaaagacggaagctggcaggatgtgacagggaatggaagtatttccattactggtaatcagacggtctatgtgcgtgtgacagatggtgaggggaaggtctatgagcagaatcgctctattaagtgttatgacacagaaaagcctacgctttctgcatctctgacagatggtgtactgacgattcagggaaatgataccgtttccggcattacttctgtgacagttaatggcaccacttatacagatctgaaggatggaatgctgagagtgcaactgacacagaaagattttacaacaaaacagattgaaatcacggtaacggatggtgccggaaatacttctgaaaagtatgtgttgcagaatccttattatgaatgggcaaagaagcaggcagagaaacagaaaacttcaggtgacagcaatggtgcgatggcaaccacgaccagtgcagatgcaactgggactgagaaaacaacgacttcaccacttccgcaggatgcacaggcttctgagccaacagatgcaaaaggaactgtggatgatcggacagtgacaggtattgaggaacagcttaataaagaaggcgagacagcagattctgttaccaaaacagctacggaaggcacaaaagagttttataccatttcaactaagagtggtaagattttttatctgatcatcgacaattcaaaatctcaggataatgtgtatttccttaccgaagtcagtgagaaagacctgatgaacttcacactttctgattctgtgacacttccggaagtagatattgtttatgcagaaccagagaaacaggctgaagaagaaaagccggaaacgacagagacagatgagaaagataaggtagaggatgaaattcagatgccagaagacaaaagtttggcagggacttatctactgatcggattggttgctgttggagctgcggcaggtggttattacttgaaagtctacaaaccgaaacatgaatatgatgatgaagatgagatggaagaggatgaaaatgaatccgaagattcagagtcagaaaaacgggaagtagacgatgcagatgagcaggaagaacaggaaaatgcagggacagaagttttgaaagatgaagatttcaatgatgaggtactagaagatgaagaagaggagcaggagtaaatgaaattagtgattgcagaaaagccatcggttgcgatggcactggcttccgtgcttggagccagaacaagaaaagatggctacgtggagggaaacggttatatcgtttcctggtgcgtaggacatctagttggattatgtgatgcatcggaatacgatgaaaaatataaaaaatggagatatgatgatctgccgattgtgccagaatgttggaaacataaggtattggaaggtacgaaaaagcagtttggaatcttaaagaaacttatgagagattccaaagtagatgaagtgatctgtgccactgatgcaggacgtgaaggtgagctgatcttccgtctggtgtatgagcaggcaggatgtaaaaagccgatgaagcgactctggatctcttccatggaagaacaggcaattaaagatggatttgcgtcattaaaagacggttcgtgttatgacagtctctatcagtcagctctttgcagggcaaaggctgactggctggtgggaatcaatgcgagccgtcttttttctgttctgtataaccagaatctgaaagttggaagagtacagacaccaacacttgccatgatcgtggatcgaaatcagaagatcaaggaatttaccaaagagaaatattatatggctcatatcaaatttgacgatatggatgcggtcacagagaattttcagaaaaaagaagatgcagataaagtggctgcagagtgtcaggagcgcatgtgcgaagtggagaaggatgatgtgaaagagaaaacggtccgccctccgaagctttatgatctgaccactctgcagagggaagctaacagaatgtttggctataccgcacagcagacattggatgctgtgcaggagatgtatgagcagaagcttgtcacttatccgagaacagacagccagtatctgacagatgagatgggagaaagtacagaaactctgattcagatgttatttgggaaaatgccttatgctgaaggtctggaatatcaaccggacgtgagtaaggtattaaattcaaagaaagtatccgatcaccatgcgattatcccaaccatggaagtagccaaagcagatattggtgaactgaaagaacgaagccgcaagattttgtatttgatcagtgccagggttctgacagcaactgcagatccttatatttatgagagtcataaatgtcagattacctgcaattatcatacgttttatctcaatgcaaagaaaacaaaacaggaagggttcaagacaattgagaaaaaactgaaacagttctttggaatcattgcagaaaaagaagagccggagttggatatctgggcaggcaagcattatggtccctgtgattcttttgtatcggagcattttacacagccaccgaaacagtacacagaagataccctgctttctgcgatggaacgtgcagggaatgaagagctgaccgaagatacagaaaagaaaggacttggtactcctgcaacaagggcagcaatcattgaaaaactgattcagtctggctttgtgaaaagggaaaagaaaaatctggtgccgacagatgatggaaatgtgctgattacggttctaccggatgagattaaatctccgaagatgaccgcagagtgggaaatggcattgaatcatattgcccagaatacagagacagcagatgaattcctaaatgggattacagagctgatgcaggaactggttgccaggtatcaggggatttcagaagagaagaaaaatcagtttcagggaaaggcaaaaggagaagtcattggcaaatgtccccgctgtggagcagatgtcagggaaggaaaagtaaatttttactgttctgaccggaaatgtgcttttaccttatggaaaaatgataaatttcttgcaagccagggaaaaaagatggataaggtggcagcaaagaagttcctgtctaaaggaaaaatccattataaggatctggtatcaagaaaaacagggagacagtatgaagcaactgtggagatggtcgatcccggagagggaaatgtacagttcaatcttatttttccacaacgataagtagtgtattgcaggcagtctaaggactgtctgttttaatacaaatatatgaaagagaggaccttagcatgaagaaaaaaggtaattttagaaaagtagtatctggcttgctggcaggcatgacaatgcttagtacagtgctgtctccgatgacggcatatgcagcggagatccagccagaggaaaaacctccactttatgaggaagtgaaagaccttctggatgaagatgaggtggtgactgccaaagattatgaaattgaaacaggcagtgtatttgatgtgaaatcagattacacgggactggaaatcaaggatgataacaaggtcaaagtcacatttgaggaagcaaagaatgacaaggatgaggattttacgacagatcatgcggacacttacaaagcggtctattatgtggaaccggtaaatcaagagcatccgaagtaccagatcagccgaaaactgattgtgcgtgagaaagcaacagaagctcagactgaaactgcagggagtgaagcagtgaccgaatcagaaaccgctggcagtgaacagcagacagaggaagcggaggattcagaagcagactcggagattaccgatattgacgctgatgaatttgatgatttagtagagcaggcacagaatcaggatacctatgatgaagaatcagggttagagcttcatgatgttttggaacaggcaggagacgaaggtgtggatcttgatgctatggaagagggagagattgcaacatttgaagcagtttcagcttattcagcaagaagtacacagcaggtaacaattgaaaaaggaccactgtatagatatgcagattataatcttggaacctatctgacagagccgtactatatcagctacggaaacgtcagagcaattgcgtattgtgtacagccagctaagccaggacctggatctggaaattatacaattacaaagattggagacaatcaggcgttagcaaaagtgtgttattacggcacagatgccgcagggagcgaaagcttttttgcgaataaacacacggatttttcagaaggaaaaagattcatcatcattcacatggctgcatcatatgccaacggaagcagtgatgcattttacggaaccaatgctacaggagaggctttggcaaaagaactctataattattgtgtgaataagccggaaataccagatgtagcgatgtcattttcaaagccggatgtaaaagcttatgtagatagaaatgttcagagaacggagaacattaagttcaacgcatcttcccagcagaaaatcacaatggacttaccaaaaggagtaaagctccataatgtatctactggaaccgtaagtgcggcaggtgcaagcgtaacaattggaggaggaaccacgttttatctctcagctcctctgacacagacaagagatgtaagtgatactttttctgcaaaaatgaagggaagtattacaaaagattattcagcatataaattgactacgaatgcaagtgttcaggatctggcatttgtatttggagaaggtgttgctgatgaaaaatatgtaagcttaaaggtgtcatggattgaacaggctacgatcgaaatcgtaaagaaagacgatacagcgaatgtcaatcttgcaggtgcagtatttggcgtttacagcgatgaggcttgtacaaagctgatcactcagatgcctgcaacagataagaatggaaaatcctctgttacgattatcaagacacaggataccgtttatctgaaagaaatcacagcaccacagggatatgtagtaaatgcaacggcaacaaatgtaaaactggtagcaagtaagacctcagctgtaaccgtggaaaataaggagcagcttgcagagcttactgtttataaagaaggtcaggtgcttaccggagcagaagtcagtgagagtggaaccgtattccattatgagaaccgcagacaaaaaaatgctgtttacaacgtgtatgccggagcagatattgtgactgcgtatggtacaaaagtgtacagcaaaggtgatctggtgaaagaaaatctgacaacaggtgagaatggctctgttaccctgaagaatctccatctaggaacttatgtggtaaaagaagcaaaagcaccggacaacttctataatggcggcgaagaaaagacagtgacgctgacttatgccggacagaataaagaagttgtatttgcggatgtcaccttcaacaatgagcgtcagaaagcagaagtcactgtagtaaaacaggataaagatacaaagaaaccgctggaaggtggtattttcgccctgtatgcggcagacgatatcaaaaatgcagatggtgtagttgttgtaaagaaaggcaccctgattgagaaagccactaccggtgaggatggaaaggcaaaattcacagcagatctgcctatcaatcattcctattccgtaaaagaagaccaggcaccagaaggctatgtaagaaatacagaagacgtgtatacgttcaagttctcttacaccaatgataaagaagcaaccgtatctttcgcccataccttcagcaatgaccgtgtgacagcaaaaatcaatttattcaaagttgataaagaaacaggaaaagccgttccgcagggcgatgcaacactgaaaggtgcagtctacggattatatgcccgtgaagatatcgtgcatccggatggagcaaccggtgtgatttataaagcaggggaacaggtggcttctcttacaacggatgaaaaaggacaggcttctgtagatggcttatatcttggcaaatattacgtcaaggagatcacaccaccgaccggatacctggcagatacagaagaacatgatcttgaatgtagttatgaaggtgatatgactgcagaagtaaaaagagaatgcatttccagtgaacaggtgatcaagcagccgttccagattatcaaagcagccaacaatggaaagaccgatgcagatctgttatccggagccggatttacagtttatctgaaatcttcccttacaaagaaagcagatggaagctatgattttgattctgctaaaccagtagtgagtggagaaaacggagctactgagatttttacagatgaaaaaggttatgcctgcagtattccattaccatttggaagctatattgtccgtgaaacaacaacaccacacaattacaagccagtcgatgattttgaagtgaatatcacagagaaccatccgaatgagccacagatctggcgtgtgcttctggacaaagagttcaaggcaaaattgaaaattgtgaaaaaagacgatgaaacaaagaaatccgtcctgattgcaggaacagaatttaaggtatatgacctggataacaaaaaatacgtggagcaggtaactacttatcctgtgacaaccacacacaagtcctattttacagacagtcagggttatctgatcatgccaaagaacctgaaaatcggacattaccggattgaggaagtcaacgcaccggaagggtacacaatcaacaagaattatatggagattgctgttgatgcaaacactgcttatcagatggattcagaaagcggcgatgccattatcacagttgattacgagaatcatccggtaaaaggaaagctgacgatctataaaaaaggtgagatgctgagtggattcaaaaaggattttgtttatgaagaaaaatatctgaaaggtgcagagtttaacgtctatgcagcggaaaatatctacacaccggattatcagaaagatgaaaatggaaacagacagctgatttatgcaaaagatgctctggtaacaacggtaacgaccggggaagacggaaaagcagttgcagataacctgccgcttggttcttactatgtggtagaaaaaacagcaccggaaggatttgttctgaaccatgacagatcggatgtagcatttgtctatgcagatcaggatacacctgtgatcgaacaggaagtgactgttggtgatgacagacagaaagttgcaatccaggtagaaaaacaggatgcagaaaacggagcaacggtagaaggtgcagtctttggcatttataacaaagatgatatcaaagcagaaggcaaagtcattgtcaacgctgataccctgttacaggaaatgacttctgataaagatggaattgcttcctgtacgctggatctgccactcggacagtattatgtaaaagagttaaaggcaccggcaggattcgtttcttccgatgaagttctgaatctggatgcttcttatcagggacaggacgtgaagacagtaaaactgaaaacagtgaagaagaatcagccgacaacggttgaaattacaaaatcagatgtgacaacaggtgtggaactggatggagcaaaactcaccgttcttgatagagaggggaatgtcgtagatcagtggacttctgtaaaagaccagccacatgtgattaaacgactgaccgttggggaggaatatacccttcgtgaagaaatcgcaccgtatggatatctgaaagcaacggatgtgaagttcacactggaagataccgcagagattcagaaggtagagatgaaagatgaagtgccgacaggacttttaatcatcaacaaaaatggagaatttttggataaagtgacacttctggacaatgtaaaaggcactgtggagcatctcttcgaatatgtaaccggaagccttacagatgtgactttcgatgtatttgctgcggaagatatcaaagcggcagatggtgtcagcaaagattattacaaagcagatgaaaaagtaggaactattactacagattccaatggtattgcacagatggataatctcccggcaggcaaatactatgtgaaagaagttaaaactgcccatggctatgtattggatggagaaccgagatatgttgatctttcctaccgtgatcaggacacaccggtaatcacttatgatgaaaaatggcagaatacccgtcagaaagtaaaggttactgttctgaagaaagaaaaagatacagaccgtgttcttgcaggcggcgtcttcggcctttataccagtgaagatatcaaaaatgtaaacggagatgtgttgcttgagaaagattccctcatcgagcagaaagcaaccgatgagaaaggacagatcacttttgcggcagatcttccagtagatggaaaatattatgtaaaagagaacagtgcaccggacggatttgtgacaacggaagaagtgcaggagtttacctttgaatatgccggagaagatcaggcagaagtaagctatgattttacgtttgaaaatcagccgaccacagtggaactgacaaaaacagacctgaccacaggcaaagaacttccaggtgcacacctgaaagtgacggatgcagatggaaatgttgtggatgaatggacttctacagaaggatctcatgtgatcaaagaacttgttgtaggtaatgagtataccatgacggaaacaaaaccggcagacggatatgttactgcagagagcattacctttacggttgagaatacagctgagattcagaagcatgagatgaaagatgatgtgaccaaggttcagatcagcaagacagatatcacaggagatacagagattcctggtgcaaaactaacgattcttgataaggacgatcaggtagtagagagctggacttccacagaggaggcacactatattgaaaaactgccaattggtagatacaccttacgagaggaacaggcaccaaaaggatatcttctgacatcggatgtgacatttgaggtgaaggatactggagaaatccagaaagtggttatgaaagatgatactgccaagggaaaagtcattctcaataagacagataaatcatctggggaaccgctgaaaggagtagaatttgaattccgtgacagcaaaggaaaggtcctggaaaccttaaaaacagatgctgccggtcatgccgagagtaagctgtatgagattgccgcattcaagaacggcaaatatgatacagcaatcaagtattatctggtggagacaaaaacactggatggatacacactggatcagaccaagcatgaagtgacatttgcctacgcagacgacagtacgccggttgtagaagttactttcaatctgacaaatgagaaaccggaagttccggaaacaccaagcacaccagatgtgccgcagtcccatgaagagacgaaggtatcagatgcaccgaagacaggagataacacaaatatctggctgccgattctgcttctgcttatctctaccggaggcatggcaggactttatatcagcagaaagaaaatcagaaaacagtaatcctcagtaaagggggccctgaatcagggctccctttaaaatacaaaaattcacagaaagggacagaaaaatatgatgaaaacaatggaaaagagacaggaagcaagaaagaaccaggagagaactttaaaaagaatgatggcttatcagaaaaaagccgagcagatggtcagcaggaaaagaatgaaccatcacatgatcagaaaggggtaaaagcgtatgatgaacagaaaagaattttatgaatatgtcaaagataatgtaaaagactatttgccggattcatatcagaatggagaaatccgtattgaagaagttgcaaaaaataatggattaaggttgactggcatttcaattccacagggtgatcaaagagctgtgccgatggtatatctggattctctttatatggaatatgtcaatggaaaaaatctggattcctgtgtgggtgatgtggcagatatgcgtattgaagtgcaggacaaagcggcatttatcaatatgggtcttccggatattttggattatgaaaaaatgaaggacaaattacaggtgagaatctgtgaccgggaatggaatgaagaacgcctggctgataaagttgttaccgaacatggagattttgcagcatattacgcagtgaatgtggaagaaaacgagggaggaattggtagtattccggttactgtcaatcttatgaatgaatggggtgtgacagcagaacaaatccaggcagatgcagtggcggcagacagaaatcgtggtgttgttttgatggacatgaatgaaatgataaaatccatgatttttggtgaagaagcagaaaatcttttgaatgaaaaactgaatgttgaagcaatggaaaatccaatgttctgtctttcaaatgcacaaaaaatgaatggtgcatcactgttactgcaggaagatattcgtaagcagatcggtgaatgcctgggaagtgattattttgttcttccctcttcaattcatgaggtgctgattcttcctgataacggaatgtttgaagtaccggaattaaatgccatggtacaggaagtcaatgagacgcaggtagagaggcaggaacagctttcggataaggttcagttctgtgatggaaagacagcagttatggaaaatgccgaacgcagggaagcacgtctggagaaagaaaaagcagcagaaaaagcaactgggaggacagaagcaaaaggtggaatccatggaaaactggagaaagccaaggcggagatcaaagcaaaagggacagatacaatcccaaagaatagggcgaaagaccttgcctcagtattataacgagaaataacgatgattttgaggggactgtgtgagcagtccctaattttatgaagatggaggagaaaagaatatggactggtgtttatatggtgatgataaaagaaaggaaatggatagagatttaaaaccggaatatcttttggatgacttacggagatatcaggatgtatttggtgaagaatttggtgtaaaagagcttcttatgctggaggatatccgggtaaaggctatgattgccggagcacttgcagatatgccggaatttcttattgatcagattggaaaagcaagtaacagtagtaattttccttctatgacaagggcaatggaacggattgccgatgttgtagaagaaaagtgggaagaagaaagggagtaacagatggcaaataaattatatgcaatggaacttctgacggaggaagtggcaaaggatgttgctgccaatccgcaggaatggatgcggtttctaaatactgcatccaggctgtaccggtacacttttccggaacagctcttgatctatgcacagcgtccgggagcaacagccgtggcatccatggaaatctggaaccagaagatgtaccgatggattaaaaagggttctaaaggaattgccctgatagataacacatccggaccaaaaacgaaactccgatatgtttttgatgtgcaggatacttataaggtaaaaaatctgggcagagatccgcagttatggaatcttaatccagaaggagaacaactggtggcagattatctgcaggagcggctggcactggaagcaacagagggaggattagcagaggttcttcaccaggcggcagaagaaagtgtgcaggcctggttgccggatgctttcgacgaactgcaaatggatgtagccggcacttttctggaagatctggatgaacagaatcagaaagtggagttccgggaactgatgacaaacagtgtctggtatgtgttactgaaccgatgcggactggatgtgcaggaatatcttgatgcagaggattttcgtcatattacagattttaaccagttaaaggttattggacaccttggaagttctgtgaatgagatcagcagaccggtattgatgcagattggacgatatgtgttgaatgacttggaaaaagatctgaaaacggttgcaaaagaaaaagaagtagcttataatgaatttaacacgttaattcgtaaaagcaaaacaaggaacacagaagatagaggagaaaataaggaggaaacagagcatgagagagatcacttacagccagaatggagagtaccagattccggatatcagtctggaggagacgagaggaacgatcgggaagtacggattgatgaggaaagagtatctgagaaaccacaaagtagccagattcaacattctgaccttacagaaccgtctggacagtcatctgatggaaatcgacagccaggcaaggcagagagtagacaacctgatgtcagaacttctggagaaaaacccggcaccggacaaaatggcagacgggatggcatggaccagacacatgaaccagatcaaagcacaggcagaggaactggtaattcaggagattatttacaattaagtctgttcccgacagaagaggaacagttaggagaaataaggaaagcggtagctgcattagaacagccagccgcttttcttatttctgatgaagtagtagatgatattctccgcacgggaagtggacagaaaaatacactgtttcatattacggcaagactgattgaaggtctggataatgaagaaatgcagaacttcctgaaggaggaatatgaaacaggtggaaaaggatttaccatagatggacagaaaatcagtatctggtatgacaatgatggtatccgtatccgacggggagattccgccagaagaaactttgatcgcatggttacgtgggaagaagcggcggacagaatccgggatatgtatgaggatagaagttacgtggataatctgatttccaataacgccattgaacaggagcaggaagaaatgaccaatcttcttgcactccattttcgggataccagcagaaaccgggaggagcagcaatcatattcggattggcaggatgtcgtgcgggaagcttggacagattcagcggaagcagatgcaattgcccatcgctttgaatggctgcagaaagatatggatgagaatccagaagattatcgcaggtgggagattcagcataatccggaatatttccagcgttttcaggatctccagagggagcgttcctgggtagaccagaaatttacggtcgaacgtccggccctttcctttatcacacaggatgagatagatgcagtccttagaagaggcgggatcactgccggaggacggaatcggatctatgagtatttcatggaacatcacgatataaaggatgcagctgagtttctgaaaaatgagtatggtacaggtggagcagcacctgggataccgggagcgtatgaatccgatgcttcccatgatgcgaaaggattaaaacttgcgaaagggaagattggcagtccagatgtagaagttctattaaagtggaataaggttgcagaacgtgtccgtcagctgattcgcaccgatgatttcttatcaccggaagaactggaaaagtatgaagaacggcaggaagcacagagacaggcggatctggaaggagctcagcaggctttggaagtggagcaggaaggctctgatcagcaggaaatacgagaggaaaatcaggaaccgtcggaggttgagacacaaccggaagcagtagaagatgcagaaaaaaaggaagatataacaccagaacagtctgatattccagcaacaaacttccatatcacagatgatgaactgggacagggaacaccaaaggaaaagttccgtgctaatatcatggcaatccagcttttaaagaaatgcgaggaagaaaaccgcaatgccacaccagacgaacaggagattttatcccgatatgtaggctggggaggtcttgctgatgctttcgatgaaacaaaatccgcatgggagacggaatatctggaattaaagacagtccttacaccggaagaatatgcagcagccagagcttctaccttaaatgcccattacacacagccaatcgtgattgaaagtatgtatcaggcgttggaaaatctgggatttacaaaaggaaatatcctggagccatccatgggtgttggtaacttctttggaatgcttcctgagaagctgaaccagtcaaaactctatggtgtggaactggacagtatcagcggtagaattgcaaaactgctttacccagatgccaatatccagattaaaggttttgagaagacagattatccgaatgatttcttcgatgtggcaatcggaaatgtgccatttggagcttataaagtgaatgacaggcaatatgaccgctataattttatgattcacgattattttctggcaaagacaatcgaccagttgcgtccgggtggtgtggcagctttgatcacaacaaaaggaaccatggataaagcatcaccggaagtccgaaagtatctggcagaacgtgccgatctccttggagccatccgcctgccgaacacagcattcaaagcaaatgcaggaacggaagtcagtgcagatattttattcttccagaagcgtgacagcatgacaaaagagatgccggagtgggtgaatcttggaagtgatgccaatggaattacggtcaatcagtattttgcagaccatccggaaatgattctgggtgagatgaaagaggtatccggtccgtatggtatggaaacaacctgtatgccgatagaaggtgctgatcttgaagtccagcttgcagaagctgtcaggaatattcatggaaatatggcacctgcagttgatgtggatgcagaactggatgatgtaccagagagtatcccggcagatccgaatgttcgtaattacagttatgcggttgtagatgatcaggtatattaccgtgttaactctctgatgaatcaggtaaagatgcctgccgctactgcagaacgtgtaaaaggtatggtggagatccgagacacggtgcgtgaactgattgccatgcagatggaagaatccgtaacagatgaagaaattcacaaacagcaggagaaattgaatcaagtatatgatgcttacacagcaaagtatggagtcatcggaagtaatgcaaacaagcgggcgttttctgatgacgcttcttattgtctgttgtgttctctggaagacctgaacgaagatggaacattgaagcgaaaagcagacatgtttacgaaacgaaccatcaaaaaggcagtggcggtaaccagtgtggaaactgcgacagaagccttagcattatcattgaatgaaagagcaaaggtggatctgtcctatatggcacagctgacaggaaagacagaagaaaaaatcacggaggaactggttggagttatatttaagaacccactgacagaccagtgggagagtggagatgagtatttatctggaaatgtcagggagaagttaaacacagcaagaacctttgcagagaatcacccggaattcacaccgaatgtccgtgcattggaagcagttcagccaagagaactggaagcatctgaaatcgaagtaaggattggggcaacctggattgaaccatcggattatcaggactttatgagggaactgcttcatactccgtggtatcttgcacagaaggagatacaggtaaaatattctgaggtgaatggtgagtggcggattaccgggaaaaatgcagacagtccaagaaatgcgtttgcctatgcaacgtatggaaccgagagggcaaatgcttaccggattctggaagatacactgaatctgaaagatgttcgtatctatgataagagtgtcaatgaaaatggggatgagattcgtgtcctcaataaaaaagaaactatgctggcatcacagaaacaggatgccatgaaagcagcatttaaggattggattttcaaagatcaacagagacgtgaaagactggtaagagtttataatgaacggtttaacagtatccgtccccgtgaatacgatggcagtcatctgactttcccaggaatgaacccggaaattgaacttcgcccacatcagaaaaatgctgtcgcacatcagctttacggggataatgtgcttctggctcatgtagtaggagctgggaagacctacgagatggtagcggctgcaatggagagcaaacgtctgggattatcacaaaagaatctatttgtcgtgccgaaccatctgacagagcagtggggagccgagttcctgcagttatatccgggagccaatatcctggtggcaaccaagaaagattttgaaccggcgaaccggaaaaagttctgtgccagaatcgctatgggaaactatgatgcgattatcatcggtcattcccagtttgagcgtatcccaatctctgatgagaggcaggaagccatgctgcggaagcagattgacgatctggaaatcgcaatccagagtgcaagatatgagcaggatggcggccgctatacggtaaagcagattgaaaagaccagaaaaacgctgatgacaagactggagaagctgaatcagaaagagaaaaaggataatgtagttacctttgaagaactgggagtggatcatctgtatgtagacgaggcacacagttataaaaatgcgttcctttatacaaaaatgagaaatgtagccggaattgcccagaacgaagcacagaaatcagcagatatgtttaataaatgtcagtatctggatgagattaccggtggaaaaggcattacctttgcaacgggcacaccgatcagcaacagcatgacggaactttatgtcatgcagagatatctgcagaacagcaaattacagaatatgggcttgggattatttgattcctgggcatccacgtttggagaggttgtgaccagcattgaacttgcaccggaaggaaccggataccgagcaaaatccagattcgccagattctataatatcccggaactgatgaatatgttcaaggagattgcagatatcaagacttcggatcagttgaatcttccagtaccggaagcggaatacgaaactgtagtattgaaaccaacagaacagcagaaagaaatcgtagcaagcctaggagagcgtgcggaagtggtaagaaacggtggcgtagatgctagtgtagacaatatgctgaaaattaccaatgacggaagaaaactggcactggatcagcgattggtcaatgaactattgccagacgatccgggcagtaaagtgtcggtctgtgcagaaaaaagctatgaaatctggaaagatacagttgtacagaaatcggcgcagatcattttttgtgacttgagcacaccgaaaggcgatggcagtttcaatgtttacgatgacttgaaacagaagctgatggcgaaaggtgtaccggaaaaagaaattgcattcattcatgatgcaaataccgaagcaaagaagacggagctgtttggaaaagtaaaatctgggcaggttcgttttttgattggttcaacagcaaagatgggtgccggtaccaacgtgcaggatcgtctgattgctctgcatcatctggatattggctggaaaccgtctgatctggagcagagggaaggacgtatcatccggcagggaaatcacaataaaaaggttcatatctttcggtatgtgacagaatccaccttcgacagctacatgtggcagttgatcgaaaataaacagaagttcatctcccagattatgacgagcaaagcaccggtcagaagctgcgaagatgtggacgaagcggcactgtcctatgcagaggttaaggcactggcaactggaaatccggcagtaaaagaaaagatggcactggacgtggatgtggcaaaactgaaacttttaaaagccaatcacatgaataaccagtaccgtctggaagatgatattgcaagaaattttccacagcagattgcaaaattgaccgagactattgatagctacaaagcggatattgcccattatcaggagcataaaatcacagatccagaacagttttccatggagatcagcggcaaagtatttacagaaaagaaagaagcaggagcggcactactggcagtctgcaaggacatgaaagcagtcgatgcagcaatggatatcggaaactatcagggattcaacatgagaatccagttcgacagctggagtaaggagtttatcctgtctgtgaagcatgaatcggtatcgaaagttcatctgggagcagatgccctgggaaatatcacccgtatcaataatcttttggaaagctatccggagaaactggcagaagcggagcaacgattggaaacggtacaggagcagcttacaaatgccaaagaggaagttggaaagccattcacaaaagaagaggaactgaaccagaaactggagcgactgtcagaactaaatgcccttcttaatatggatgaacgggaagacacagaagcagagcagtcagaatcgaaagagaaagaagaacgaccggcacgtggttctatccatgagaaattgcagatttataaagaaaaaagccagcgggaaagcgagaatggcagggaagatagaaaaagggacttcggtctggaataagaaaacaggaaagatggcataatttggtagaaagaatgttctgccggttatgccacttttgggaatacaggaggaacttatatggcgagaaacatgataacaggaatagaaacgcagaaaatgcaggaatatacacaggaacaaatagaccgtgcagaacacatgggaatagcaattccagcggacgtaaaagaacagatttttgaatatgcaaatctggttggcgaagaagagaaagtaaggacgctggtaagaaatctggcagatgcagtcaatcggtcagatgaagatagagtagaggaacttctggatgatgcccaaatggatattcaggacttaccagatccaaccataggcaagctggaacttcgggattatggatatacagcagaggatatggtgccgcttagaaaagcagcagccctggattatcacagaatgggttctaaaatctattgcctgggtagtgatggcagcaagggagagtatgcaagtaaagaaatgatacaggcacatgaagggctgtttggcatggaatcacagatgtgggaacggataagggatcaggatctggattatgcagatgaagattttggagcatttcaggagccgatgaatgtgattggacaggaagaagctctgaaattatatgatgccggagcagatatctatctgattaccaatttttcatcaccaatctatgttacagagcgaatggagattgaacgaggtccggagcattatcagatgtctacagaagaactggaacgattccgcaatttggaatgggagatgcagaaatatccgcagattcagtctttgaaagaggcaaatctgctattagggacaagacgaacattcggtatttatcaaataagagatggtttgccaggtgaaaactatgcgtttatgaatatgagcttcattgaaagtcacgggatgcagattaaaaaagaagactatgaactggtctatgtgggagaattatttggaaatatgtcgctagatgatatatttgaacgattcaacatcgacagaccagaagactttcgaggacattccctgtctgtcagtgatatcgtagttctgaatgaggggggaaaggtaaccgctcattttgtagacagtatcagttttgaacagctagattctttcctgaatctggaagaacaggttcttagtgaactggcatatgaggtaggagaacgttactttgctattcagagaacagaaggaggatatgattattccttttacgatgaagatttccgcctgatggatggtggcgtctatgaaaatggtgaaatttctattgaagaagcggcagaggaacttttggaagacgaaggatggactggagaacgcatccgtggggattatgatcagttgatggaaaaggtagaagaaatggatgaggttgtaatggcagagattcagaaaagccagggcgaatataagccattggcaaaggtagaagaactggaagaggcaaattataacatgattgataatgtcctcaataatatgccaccgaagaaagaaccgtatctggaatactttgccgcagaatgtgatgagttccatgatatgggagcttatgaaaaaagtaccgatgttaatcagattgctgcggtttatgaaaaatatagggagaatcctgagaatgcctatcgagtatgcagtatggggattatctatcgtgatccggaagacagttactatgatgatgctgaatttgcaatcgtaaaaggaaatacagtacttggaaatctgatggacgatgttcgattttatggagaacttgcactgatacgggaagggattgagaaaattcatgatgcattgccggactataagtatgtaccaatgcgggatgttcgggaagcaatgtatccagagaagatgaccacagaacagttggcagaggcattggatgagattgcagaagcttttgatccgtatgagtatcgagataatgtggagacgggagaaaatacggtacaagaggtgatgttggatttgcagagtggcaatacacattcttatatttcttatctgaaggatattgtagacgaagaatgtgaccagtctgtgcgtgcaggtgtattgattgaaagactgaaagtctatgagccggagtttccaaagaatctggaaccaatggtgtatgtaaactattgtgaagaaagtgctctcatgaatccaagatgtcagaagttatccgagctggatgcaaaaacagcagaaatggataaagaatggtatgcaaaacgtgattcgaagacagaggaacctacaaaaatcacaaagatatatgtgactgtatattatgcggaaaaaggtgaacagatgctgcatcatttcaagaagtcaatagatattggaaatggacatggcggtattgtgagtcagttgaagtatgataatgaaatgaagcttacagatgagtattggatcaattaccagaaaggtaaaggaagtgaagagttccaaaaatatatggaagatctgacagacatgcagaatcatgtgcttccgtatctgcagagcttttgcaatctggaagaaaaaggtgtgaaagagagacgagaacagcagataacggaaagaaatgaaggaagagcagatgagcggggaacaagtaccgaagcgaatgcagtggtcaaggatgcaggaaaagcagataggaaacaggtacaacagaagcaggcggtagttggaaaagataagaaattatccattcatgaacggcttgagattaataagaggattattcaagaaaagcagggaaaagataagccggagagaggggctgatcggggtgtgagataagtataatattataattctaatgaaggatgtagggagtcaatccctgcatccttttttaatgcgtaaatatggattgaacgttataatgaaagcagattggagatgtttttcttctaaccacatcaattaggaaaagagtatctgtagcagataaattcaaaaggtttgtgaataaattaaaaaagatattcaatatttgaaaaaagatatgtgatatttgtaaatgcgaattgtacaaggagttttttgtgtgataaaataattttgatattgattgcacattaaacggaggaaaagaggatggcaattagttataatggattatggaaacagttaattgaccacggaatgaaaaaaggagatttgtgtgccaagactggtcttagctccagtacaatagcaaagatgacaaactgcgagtcggtgaaactatctgttttggaaaaaatctgcaaagagttggattgtaactttggagatttgattgactatgtaccagataacaaagaaaagtaaattaccttatggaggaaaatgtaaatggctacgagaagtgcaaaaatagatcagaaagcagacctaatatgggcaatagcagataagcttaccggtgtatataaaccacatgaatatggagatgttatattaccacttacagtaatcagacgttttgactgtattctctcagatacgaaggatgcggtattacagaaatacgatgaagtaaagaatcttccaatgaaagatattttacttcgtaaggcttcaaaaaaggatttttacaatacaagtaaatatacatttgaaagacttatggatgatcctgaccacattgaggagaattttagagagtatctgaataaattttcagcaaatgtgcgggatattctggaaaaatttaagtttgatggacacatcacaacgatggcaaataaggggattctgtatattgttttaaaggaatatacaacagacagaggaaatcttcatccgaatgaaatctctaaccttgaaatgggatatatttttgaagaaattataagaagattctctgagtctcataatgaagatgcaggacagcattacactccaagagaagttatccaacttatggttaatattctcttctatgatgataatgacatcctttctggcaataatgtggcaaagacgatttatgatcctgcctgtggaaccggaggtatgctttctgtagcagaggaatatttacatagtctgaatgcatctacagagcttgtatcgttcggtcaggaaatcaatgaccagacatttgcaatctgtaaggctgatatgctgattaagggtaacaatgctgattacattaaggatggcaacacattatcggatgaccagtttgcaggcagtacatttgactatatcctttcaaatcctccgtttggacgtgagtggaagaatgaaaaggcaaaagtagaggaagaggcaaagcttggcttcggaggaagatttggagcaggacttccggctacaagtgacggacagatgctttttcttatgacagcaatatcaaagatgaaagatattgataaaggtggaagcagaattgcaatcattcataatggttccccactttttacaggagatgcaggaagcggaccttctgaaatcagaagatatattcttgaaaatgatctgcttgaggcaatcattgctttaccgaatgatattttctataacacaggaattgcaacctatatctgggtattgtcaaataaaaaggcaggtacagtcagagaaggaaaagtgcagctgatcaatgccaatgagatgttcgtgaagagaagaaaggcattaggaaataagcgaaatgatatctctaaggaagatattgcagagattacaaagatatatggtgattttaaagagagtgaaatcagccagatttatgatgacgaggattttggttataccaagattacagtagaaagaccgcttcgtgatgaagaaggcaatctggtattgaaaaagggaaagaaacagccggataccagtcttcgtgatacagaaaatgttccgttaaaagaggatatcaaagagtactttgaaagagaagtacttccatttgcaccggatgcatgggtagatgagaaaaagtcaaaggtgggatatgagattccgtttacgagatatttctataagtatgaagctccaagaccatcagcagaaattatggcagagattatggatttagagacagaactatctggaagtcttgaggaggtatttgacctatgagagagatgaaggatagtggagtggaatggattgggaagataccaaaagattgggagattgttcccttaacaaagcaattagattcaattgtcgattataggggaaaaacaccagaaaaaacagaagaaggaacttttttagtaactgcaaagaatataaaagatgggaaaatatgctatgagttatcaaaagaatacgttcgtgaagccgattatgaggagataatgcatcgaggaataccacaaattggcgatatactatttactacagaggctccattggggcaagtggctaatgtagatagaactgatattgccttagcacaacgtattataaaatttagagcattaagtactgttaataactattatttgaagtattggatgttgaacgagggattccagcagtttttacattcattatctactggttcaacagcaactggaataaaatcaagcaagttatttttacttccgttggttagaccaaatatagaacaacaaaataaaatagttgaatatctggatgccaagtgttcaaagattgatgaaattgtagaaaagcagaaggtgataattgaaaaattagaggaatacaaattatcaattattacggaagcagtaaccagtggaataaatccagatgtagagatgaaggatagcggaagtgtatggtttggaaatattcctataaattgggaaatgaaaagattaaagtatgtattccatattcagaaagatattgcaggagaagaaggacatactgttttgtcaattacacaaagaggaataattcctaaagatttttctaacaatgaaggacagtttgcaaatagctatgcaaattatcagttagtccataaaggtgatttcgcaatgaatcatatggatttgctgaccggttgggtagatatttcaaagtacgaaggagttacaagtcctgattatagggtttttgtattaaatgataagaatggtatgtgtccaaagtattatttgtatatgatgcaaatgtgttatagtgcacgaattttttatggattaggacaaggtgtaagtggtatgggaagatggagactacaagcagataagtttttgaatttttatattcctattccaccatatgatgagcagaagaaaatagctgattacataactgataaggtaaatcatattgaagttgagattgataaaagaaataaacttattaagaaatatcaagaatacaaaaaatccctcatttacgaagttgtcacaggcaaaaaggaggtgtagctcatgtctgattttgatgtaaaagagaaacgatttgaggaagatatcgaagactatctgactcatcatggtggatataccaaaggtgatccaaagaaatttaatcgtgaatcaggacttgaagaagatacttttgttgagtttattaagacaagtcagcctaagaaatgggaaagatatgtaaaaatttatgcggagaattccgagaaacagatcatcgaacgttttaaaagagaagtaaagacaacgaatcttttgaatgtgatgcggcatggatttatggacagaggaatcaagttttatccgattttctggaagccggagacctctttgaatgagactacacagatgcagtatgatgcgaatatccttcattgtaccagacagcttcattattctgtacataatgaaaacagcattgatattgttctttttgcaaacggcattccggtggtatctatggaattgaaatgtcagtttacaggacaggatacaacaaatgcgattaatcagtataagtttgatcgtgccggtaaggatgcgatttttgcctttaaggaaagggtattggtacatttcgctgtagaccttaccaatgtttatatgactacaagacttgagggcgcacacacttatttcctgccatttaatcagggaagtaatggcgccggaaaagtaggtggcaaaggtaatccggtaaatccaaatggatatgatacagcttatctttgggaaagagtactctgcaaagacagtctgatggaaattttacagaaatatatgcacttgcagcaggagtacgataaaaatggaaatcttgtgaaagagactatgattttcccaaggtatcatcagcttgatgttgttacaaagctgttggaagatgtaaaaaagaatggttcaggtaagagttatctgatccagcatagtgcaggctcaggaaagtccaattcgattgcatggctggcacacagacttaccggactccatgattatgaagacaataagattttccagtcagtaatcatcgttactgacagacgagtgttggacagtcagttacagtctacagtatatcagtttgaccatgtggaaggtgtggttaagaaagtagataaaaattcgggacagcttagagatgcaatcaatgatggtgtaggcattattattactacattacagaaattcccggtaatctataaagaagtggattctgcaaaaaaaagatttgcgattattattgatgaggcacattcttcgcagaccggagatgcagcgaaaaagttaaaaagagcattagctgatactgaagaaattctgaaagagtatgccgagatggaagatgaggacgagagaaaccgcaaggatgatgaggacaagctattagacgaactggcagcacaggggatgcataagaacttatcattctttgcatttacagcaacgccaaaaggaaaaacattgcagctgtttggtcagaaggatgcggaaggaatctacagacctttccatatttattctatgagacaggcaatagaggagcatttcatcttggatgttttgcagaactatatgacctacaaaatgtactataagattgccaagattattgaggataatccggaatttgatacaacagctggttcaaaggcaattataaattatgagacactgcatccacataatatctctcagaagactgccattatgctggaacattttatgaatgtcacaagacataagataggtggcagagcgaaggctatggttgttacaccatccagacttcatgcagtacgatatgtgcaggaatttaagagacagataaaagaaaaaggactgaatgaccttgaagtgttagtcgctttttccggtgaagtgaaagataacgatgatgtgtttaccgaagagggaatgaacaaggataaagaaggcaagacaataaaagaaaaggctttgccggaaacattccatgcagatgattatggaatccttgttgttgcagaaaaatatcagacaggctttgatgaaccactacttcacaccatgtttgtggataagaaattgtccggtgtaaaggcagtacagactttatcaagactgaatcgtactacaagaggaaaagtagatacctttgtacttgattttgtgaattcagcagaggatatcaaagcatcttttgagccattctatgaggaaactgtgctcttggaggaaacagatcctaatgttgtatatgatatgaagaataccttggatgatttcagggtatatcagaaatcagaagtggataaatttgcggatattttctatcagaatgagaatcaatcagctggtgatcttggaaagcttcagggacagttaagaccagcaatagacagatatgaagtgcttgaggttgaaaaacaggatatatttaagtctaccttggcaagttttaaccgtgtgtatgcctatattacacaggtatgcagattatttgacaaggatattcatagattcagtatttattcaaaattcttatacacaatgcttcctaagggacatggtggagagaagataaatattgatgacaaagttcttcttgaatactataagctggaaaaagactttgaaggtccgatagagcttgaaagcacagaaggcggatatacacctatctccggtgattccggtcatagagagcctaagaaagacccgttgacagtaatcattgataagataaacgaaaagtatggcactcattttacagagatggataaagttcttgttcagatggaaaatgattatgccaatcaggagaaatggcagagctacgcaaagaacaatgacagggcaacatttatgctgttatttgaaaaggattttccgaatatggcagcagacagatatgagcagaatgaccagtttttcagaaaactgtttgatgatcctgatatgatgaggcaggtaatggagactgtaggttctgtattgtatgagagattgaagaagaaatatatctttgatccaaagtcgggagtaattgaagaggcgacaccggagacttatgtggaagatacatatttgacgaagaaataaggaagtgaaaacatgcagttaggatggatagatttttcaaaagaagaccggcagaaggcattcgatgtgattaaccttctgagtgaacagggagcagtcgatgaacttggaatcggcgttattcgtgatgcttttgccaattatttctttccggggacatctaccatccagactagagcaaagtacttccttattgttccatatatgttaagggaggctgttgatggcaggtatggaaaggatgcaaatagagttttaagagctatagattctgctgaaaaagattgtggcatcagattgttagaagcagatcccaaggcagaaggtgttattggaagtcgtgtattgccaaagggctgggtggcaagaaaaccatcagatatctactggaatggaattcgtacctttggaatattctgtgattatggtctgtctataccggagtatgtttcattggcggtaaagctaaaagaacagaagtctgtcagccggttgggaaacaggaatgatgatgcagaggaaaatgataaggatgattcggatgcaggagacatcggcaatattagattctggaatcttccgatttatcatgatgattggagagacaaccttacaatagagctgacgcaggaggaagcattctatctggataagcagattcagaagtcaacgaaagggtctcttttggaatatgtattgaaaaatcgtattgatttgaatgaatatgatgattttgcttctttaacggctgaactatcggaaaaagtaggtgaaaagctggcatatatgatgaagcttgcctgcgattttaataatctggtgtatatggcgagagtaagatacaatgtcatgctttcagaagacgagaatacatacgcaaatgatgaatggagcaggttgcttccggatataaggcataatgcgacagtagatctggatgcagtgtttggagaattccagttgatcaatccaagggcaaagagctttctatgtgggatacaagcagcatttattacattagatattgatatggctgatgaactgattcgcaagagggaacggagcctgaaaggagcagccagagcgaagttaagcagaacaaaggaatttgatcattcaaaatgggtaggcggtggaatgctcgattacagattctcgaatgccagaagaattgtgaatgacatctatgccggggaggtgagtgctgatgtttagaccggattcaaaccgagatagaacggattacagcggtattttgatgcctccggacggatatagattggacagagcagtaggcactacatattcacttgacctggaagcactcacagctgtggcgatatgtcttggattatctgaagaaacagatagtaagcttatgcaaaatccaattggtatgctgaatgcattgcagaaggtatcagataaaatcgtgctgttttgtgaagcaggacagattaaagtgccaacaaaaccgactgcactatctattttattagagaaaatggtagtagaggtcgcactgccaaaagatagacagcttggtcgatatccgtcatttcatccgaaaacatgggtattagcatatgtaaacgctgatggagataaaaaatatcgttttgtggtaatgagcagaaatctgacttttgacaggagctgggatatcagctttgcaatggatagcagtaaaaatgtcagacagaagaaaaagactcagcctatctgtgattttctggattatcttgtaatgaatgtgcataataccagcaataatgccggaaagaaaagaaacctgattcgtggattatgtgcagacattaaggatgtatccttttcacttgatagtaaaatatttggagaggattttgaagtgcttccacttggtattggaaaaaatgcttaccggatgcaggaggatatcctattctgcaaggaaagaggaaatgccaattcgacatttaatgagcttgtagtgatgtctccgtttttatcagaaagtgtgattgcagattttaacctgacagacagggcattgtcggactgtaagagaacacttgttacgagacgttctgagcttggaaaactcaaagcatcagatgtagataattttaccatctatgcattaaaggatgagattatagatggtgaggaagaaatttcagatgaactcgcagataaaaagaaacaggatattcatgcaaaaatctatctgagaaggaaatattcagatgttgacctgtatcttggttccatgaatgcttcctattctgcaattaataaaaatgttgaaatgatgctgtggcttggtacaaagaatatgtatctgaatggggataaattcttagaggatatattctgtggaccggtaggagatgcaaagaatccatttgagcaggttacagtagcggatgctgttttggaaacagaaagtgacaatagaaatctgctggagcagaaaattaaggacttgtgccgagtgaaaaggcaggctgtaatttcagaagataatgagaatgctggaaagtacaagatagaggttgagttcagtggtattgaatctgatagtgaggttacagtatcaccatttaattcaaagcaggagcagacattgtcagaacatatagagttttcagagcttgagatcttgcagttatcagagttctatgagattactgcaagatcaggtgatgatacaattcgcagaattattatgatccctacaagtggtttcccggatgacagagaaagtgctgcagtaaacagtgtggtaaaagatagggcatcatttgttgagtacatagcgtttgtacttggtgatgattatgtagcatctatgcttgaaggaaagcagatgggagaatccggcttttttgccaattcgagtgatgcaatgccggcactctatgaaaagatgttaaagacatctgtagaagggccggaaagaataaaagacattggatatgtgcttaagatggttacagataaggatattataccggatgaattccgtgaactgtatgagactttttgtaatactttgaaaatcagaagataacgaggtgatgtcatgttacaatttaatatagatgaaattgaaaagcgtaccctttccggtctgaaggattttcaaagagcgactgtggagagagtggattatctgttccggcataatcagaatcgtgtgcttgtagcagatgaagtgggtatgggaaaaactcttattgccagaggagcaattgtaaagacagcaagacttagaatcgaagagaaagatgatctgtttaaggtaatttatatctgctctaatcagaacatagcaaatcagaatatcagaaaacttgatgtaacaggaaagaatgccatcggctcagtatcagataccagactgtctatgcagcatttaaagattactgagcaggaaaatgatccgcagataaaggaaggttttatacagcttatcccacttacaccggaaacatctttccgcatgaccaccggaggtggaagtgtgcaggaaagagcacttatgtatgccattttaaggagaatgccggactttaaaggacatgtaacttctcttgaaaaatttatgataatggatgctgtaaaagcatgggatggatgggcaaaatggaactttgaaaatcgtgtggcagaatgcgaaaagatgacgaagggtgtctatccacaaaatgtgatagaaaaaatccttaattatcaggagtatgaaagtataagggacatgctgcttaatcatttgcatgaaagaagatacaataaacagcttacatattccaattactatgtgatgaataagcttcgtgtgatgtttgcgagaatcagtgtatctatgcttgagccggatctggtaatcatggatgagtttcagagatttaagtttcttttgtcatccgatgacagtgagcttggtattcttgcacacagtttccttagtggacatgatacaagggtacttctgttgtcggctacaccatataaattgtattctacccttgaagagatagatgaaaatcagcttgatgagcattatgcagagttttttcaggttatgaactttctttttgatgatgaagtcaaagacattaaatttaaggaagtgtggaagaattattcccatgctctaagtgagttgaaggcaggggacagtgcaattatccgtatgaaggagctggcagaaaatgccatgtatcagggagtcagcaggacagagcgtatatctgtcatggattccggtgattatacggatgacagcagcgtgaagcatcatttgcagatagatgaaaatgacataaactcctatatacagatgtcacgattgttgtcaaaaacggattcaaatcattctttaccggtagattatgcaaagagctgtccgtatcttatgtcctttatgaagaaatataagattaaagagcagattgaaaaatattatataaaacatccagatgaatttggaagtgaaagagaacaatgtctcttgtggctgaatcgcaataaaatcaataaatatgatgaactgccgaaaaccaatgcaaggcttgaggcactgaaagaaaaagcatttaccggcggtgcagaaaaatatctgtggattcctccatcactgccatattatgagatgcagggagcatataaaaacagcaaaggcttttcaaaaatacttgtattttctgcatgggagatggttccacgaatgataggtgcgcttgtttcctatgaggcggaaagacttacagttggaaaactggtacatcagataaagaatcaggataagaagaatacggggtattttgcggatggttcgagacgatacccggtggcaaggctcaggtttaatgtttcaaatggagaagtaagaggcatgagcctgtttgcattgctttatccttcaaagacactttctgatatgtatttaccgattgagtcattgaataatcatgaatcattagaagtaatagagaaatctgtacggctgaaactgaaagagaagcttgcgataatcgaagaaaagtatggtgattcgggtaacaataaggaagatgccaggtggtattatcttgcaccgatgctcatggatggagtcatctatgcaaagcattggatagaggatattgtgtgggaaatgaatacagacgaagaggatacaacatctgaggtcagaagcagttcaaaggataagagaaataagggctttattgctcatattgataagctaagaagttatttggatgccccggaggagattcatcttggaagaaagccggaggatcttctggaaacattggtaaatatggtactgggttcgccagcaatatgcatttatcgttctaatggaagaagcacagccagagcaacatcgcttgcaaaggtatttgtcaataatttcaatttgccggagtcaacagctatcattgatcttgcttatggcagatgcagggatgataattcccattggcagaatgtacttaaatactgtaaagatggctgttttcaggcaatgattgatgaatatatccatatgctgaaagaaacagcaggttttcagtcggatggaaatcagtatcagattgtgcatgacatgatgatggattcattgaagatacatacagccacctatatcgctgatacttatcctgatttcaaaaaacgtattaacggagctgacaggaagagtgatggatgtcgaataaggtcgagttatgcagttggatttacaaaggatgcaggagataattccaaggtagtcatgcgtaaagaaaatatcagaaatgcctttaactcaccaatgcgtccatttgtgctcgccacaacatcaatcggacaggaaggattggattttcataattattgtcgtgtgattatgcactggaatcttccaagtaatcccatagatgtaggacggattttgcggacattcaaaataaaaaagaatgtggaggtaacagacaatggcaaaatcattatttgaggaactgggcggcaaatacgaaaggcaaggggattatttgataccgtgcttaactgtacccgccgaagaagaacaggcaataggcatctgggggcaacggcatttagattatctaaaacagtaccgtaaagttacatacaccaatcttcttacaagcggcaggctaaacgcctaccttgccgacatcaacagacaggcacaggaacgctttgaaaggctcatagagggtatgaaacaggcacagggcataacggaacagctaaaggcagaaaacgccttagaatggacaggatgcctcaataacataagggcttgtgcgagggagattgtggaaaaggaaattatttttgcataaacagatgattagtggcagggggaaatcctgccgctttttctgctttagtttgtcagcttgacaaataaagggttaaggaatataattagattcagtattatacaaggagttaataaatatgcggcaaggtattcttaaataaactgtcaatttgatagtgggaacaaaaagtagcagtcccgtttcacttttaatatggggcttagttttttgtacccagtttaagaatacttttatcatgtaattttatatgcccgaaaacatataagtgttttggggctattggagttatttacccagtgataggagtatttatcactgggtatttttatgcccttttttgggtgttgataggaggaaaatcacatgaaaataattaacttaggcattctggctcacgttgacgcaggaaagacaacattaacggaaagtttattgtataccagtggtgcaattgcagaactagggagcgtagatgaaggcacaacaaggacagatacaatgaatttggagcgtcaaaggggaatcactatccagacagcagtgacatcttttcagtgggaggatgtaaaagtcaacattatagatacgccaggccatatggattttttggcggaagtataccgttctttatccgtattagacggagcagtattattagtttctgcaaaggatggcatacaggcacagacccgtatactgtttcatgcactacagataatgaagattccgacaatttttttcatcaataaaattgaccaagaggggattgatttgccaatggtatatcgggaaatgaaagcaaagctttcttcggaaattatagtgaagcaaaaggttgggcagcatccccatataaatgtaacggacaatgacgatatggaacagtgggatgcggtaattatgggaaacgatgaactattagagaaatatatgtcagggaaaccgtttaaaatgtcagaactggaacaggaagaaaacaggagattccaaaacggaacgttatttcccgtttatcacggaagcgctaaaaacaatctggggattcggcagcttatagaagtaattgccagtaaattttattcatcaacgcctgaaggtcaatctgaactatgcgggcaggtttttaagattgaatattcagagaaaaggcggcgttttgtttatgtgcgtatatatagcggaacattgcatttgagggatgttattagaatatctgaaaaagagaaaataaaaatcacagagatgtgtgttccgtcaaatggtgaaatcgtcccggctgaccatgcctgtccgggagaaattgttattttagctgatgatactttgaaactgaacgacattctgggaaatgaaaaactcctgcctcacaaaacatggattgataatcccatgccattacttcggacaacggtagagccgcaaaagccggagcaaagggaagccctgttaaatgccctcgcagagattgctgatacagaccctcttttgcattttgacattgatactgttacacatgagattatgttatcttttttggggaatgtgcagatggaagtcatttgtgccatccttgaggaaaaatatcatgtggaggcagaaataaaagagcctactgttatatatatggaaagaccgcttagaaaagcagaatataccatccacatagaagtcccgccaaatcctttctgggcttctgtcgggttgtccatagagccgctccctattggaagcggagtgcagtatgaaagcagagtttcacttggatatttaaatcaatcgttccaaaatgcggttatggagggggttctttatggctgcgagcaggggctgtatggatggaaagtgacagactgtaaaatctgttttgaatatggattgtattatagtcctgtaagtacccccgcagactttcggctgctttcccctatcgtattggagcaggctttaaaaaaagcagggacagaactattagagccatatctccactttgaaatttatgcaccgcaggaatatctctcacgggcgtatcatgatgctccaaggtattgtgcagatattgtaagtactcagataaagaatgacgaggtcattctgaaaggagaaatccctgctagatgtattcaagaatacaggaacgatttaacttatttcacaaatgggcagggagtctgcttgacagagttaaaaggataccagccagctattggtaaatttatttgccaaccccgccgcccgaatagccgtatagataaggttcggcatatgttccacaagttagcttaacagcttgcaaaagtcatataaaatgagatttgaaaggattagagactaattatgatgaaatgcgaatggatattgtgtcctgtttgtgggagcaaaacccgtaataaaattaggaaggacactgttttggagaattatcccctttattgtccaaaatgcagacaagaaagattgattaaagttgacaacttgaagataactgtcatcaaagagccagacgcttaagacgcagagccgatgaaattgtggaacaattcacgaatcatcggctctttttgtttcgtatttgaaagaacaaactcaccaaataaaaaaaacgatattcgggtgggttattttgttataccctaaattaccctctgaatttgtttttaaatttggagggatttttttatgtccttttttcgggcagttacaggaaaagggaaaatagcagtaaagccggataaaatccggttatatgtcaacaaggaagaactttgcaaagaatatgaagatactctccgaaggtcaacagaagatacagagcttctcaaggatttgtttgagaaacttggttttcagagaaaagaccttaaaacagtatattttaatgtcgatacagaatatgaaagctatcaggacagagataagagctggaagcgaagatttaaaggttataagtataatcaccatatgaaaatagagtttgcagctgataataaaagattagggcaagtcctttacgctttggctcatagctcattaaggccagagttttctattgagtatacagtggcagatgtagaaaaatgtaaaaatgagctgttacataaagcaatcgaggattccattcaaaaggcacaggtgcttacaacagcagcaaatgtgaaattgggtgaaatacaggcaattgattattcttggggagagatagattttgtaacaaagccattgaatgaaatgagattaatggagtgtacggaatgtgaaatgagtgcaccgggagcatatgatatagatattgaggcagacgatattaatgttactgatacggcaactgtaatatgggaaattgcataaagaggaagatataaatagattagacgaaaagcaagaggcaccgttaaagtaggtacctccttctttttagagagttagctctttttctgatatgggaatttgcatctccggagcattaagtagtgctgtgaaattctgtctaatgatattcagtgtcttctgctttttctgcaattcttgtttttcccggacagtagcagcttgttcagattcaagattttctatcctattctggattttattagagcttgggattttggtaacaccgagatcctgaagctctttttttagtgaatcgtgcagttggtattctgcttgatgtttggttcggtatgcttttggatttttagcagatttgcaatcttcaatcacttttcggcagagacggtaagaatcacagtgtttttgaatgattttctgtgtgctcagctcactgttgatttgcgttattctttgatcagccgctttaacagaagcatcaacatcagaaacatgctgttggaaatcttcataattcagcaggttattttcggaaagatagttgaaggtgcgtgccgcttctttcaggttatttagttttgcccatcgttcaaatccttctcgattgccggtcgtaacataagtggagatattgatatacaggcgagcttctctggacagatgccttggagcttttattttgttacggttttttgccaaacggatgcggacattttcttctgaataatagcttccaagagatttcatataagtgaagtttttctgttccggtgcacggaaggacaggtgttttccctgtcggacttcatatccggctaactgcattttttgtaaaaattcctcatagttgatggaagtccagattgctttatcaactgcaacacgtagcttggctttccagctggtgccacgatgatattccatgttctccttataacttttgcctttttctccggttggcatactggtggcaagtccattttcatggcagatacgattactgatccggcagattttatggtagctccgcttattggaaacatacttgtgatgatcaacaaaacttgctgcattaaagatgatgtggttatggatatgatttttatcaacatgggtgcttatcacatattcatattttcctttcagtacttcgtttgcaaattgttgccctaagcgatgggcagtttcggcatcaacttctccaggtttaaatgactggatcagatgaaatgccaggttatcacctttgtccattccattcttttttgccatttctcttgtcatagaaaattcaagatctgcagtttccggggaacagccaaaactggaaactaacagtttttcttctgttttatctggattcgtgatgtagtccagagctttcttgtctgttactttaattgggaagatcttaagatacgccataattctttcaccatctcttttaattcttgcttttcttccggatacagatcaccggtgctgtttacttttttggcaatctgattaatattcacaccgatcttatgcatttcctcatactgtttcttcagtggagtggtatcggtgttgacgatgtaaccgtcgattgccattttacgaagataagctcccatattttttgtctttgattcaatcatctttctacgaataagctttttttcttctggggaaacacaaaacaaaatctgtatatttctttttctctttgccataggcagattctcctttctttggttcttcgaagtagtgacttctgtgtttttaatttagggcagggttccctaaattgctggttttccggaagtgtatatacacttcctgtccttgctatttaccggtggcacagccgccggaagagagtcttaaaaaagaaccctctataaataaggtactgagagaagaaaaagaggacatcgaagctcagaagtatgacgcaagcatgattctgtggtatagtaaaatctgaatgaaaaagaagaaaagaggtcaaaccgatgtcacggaaaaaccataagatgatagatgggagattactgcaaacgaataagaagtattcccagttaaaaatgaagcagaaagaaaagattgcggaatggatgtttcaggcaaccagagattattatatgaaaaaatgtacttttccgagtgacaaacatctggaagaagtggtggattctgtttatgaaaaaattgaagatgcagaaatctggattccgtatggagaggtcttcaagcattataaatccaaacgatcggatatcaacaaacgtgtcagaaaatctctgaatgaaaaagaagagagtcagattgagaaggtctgttttatgaatatgtgtatgattcaggatcataaagggaatgtactggctctggataaagtaaatgatagctataccggtacaacttttccaggcggtcacgtagaagcaaatgagatttttcagaaatctatgattcgggaagtctgggaagaaacaggacttacggttgaagcaccgaagcttggaggattatatcattggcataagagcggagtgcactatgttattaccttgtataaagcggataagtttaccggagaattaaagagttctgaggaaggaagagtttattggattccgctggaagagttaaaaacaaaagaacttgctacaggtatggaacacgttttgcggattctggaatcagagaaggtggacgagtgctatatgcatctggaagcagatggatatgtgggagacttgtattaaagaattacatgagaaatggctgcctgctcattggagaaaagacagccattctttataagatacatcattcatctattctgttttttgcggttcgtttttggaagtgaaattaatatatttggcacgttgtaaaattgaaataactgcatcaatgctttcaggattggagaagctcatgataaaaggttcttctttaaattccatgggttcgaacccaggattctgatctggattcttgagtatatggatgggacgtgcactctgattataaaatgccagttgtgcggaatctgtagtgttaccgatgacaccaatgcctacatccccttttccaaagtctattctatgtttatttaagttgatcattttcaaaaatctcctttttcaaaaatagcatatttagtaattttctattattcccgaagtagggatatcttttaaaaagtcactgttggaagtaatcggagaatctacaatctgaacgccgcttcgtttcatcattcggaatttgaaatcaagaagttccggtggaactttcagttctgcggcagcctggaaaaaggacatatcggcgttaagcatctccagtacatcttcatcttccagaagataatcagcggcaaagcaattcgcttcatattcacattgtgatactccatcgaataattcaaaatcatgaaaacacttgatctgaagggttttctgatgaaggagtgcgtgaccgatctcgtggatcaggataatctgctgtatgatttccggcaggtcgcagttaatgacgatgcaggtctttcgacattcccgcatacagaagcctttgcaacagtttggatcagttccaagcggaagcttcttaacaataatatgcatagcggctgcaaggcggtacggatcactttcctgatattttgtttttactttactaacagtgtctcttatacattttgaactcataaaaacacctcgatatttcataagatagtttgctgcaagtatagagtagcaaaagtgctgtacgaaaatacggacacctatgaatccctttccgtttcagtgtttttctttttccgtccaaatgtctttttagcttccatcttacaggaaagatatgctttggttacagcctgatagaaagcatcttttgcttcttcatcgagttcgccaccagcaaaaagagcacggttggcttcgagaatctcattgatgtccctggcacctttttcaccaagctgtccattgacttcatcaatataatccattttttcaattccataagaaggatctgtgatctcatcatgttttaaataatcataagagacatttaatgcatgagcgagctttctcatagtagagattcgtgcgattgtgccggaactttcataagctgcgattgcacgctgggatacgccgaccagttctgcaagttctttctgtgtcagatgattttgttctcgttgaaatttaatcttgtctgaaaaattcatagtgggatcctttccaagtttttgaaatcgtaacttcatcaacttcataaaaactattgacagagttcattatcacgtatagaatacaaacaaacgttcgtgaagttagtagaaattataattcaaaaacttcacaaagtcaatatgaagcaaagaagttttattacgatttttagactggtaggtgaatgttatgagcaggacaattcttcattcagatatgaattgcttttacgcaagtgttgagatgctgcatcatccggaacttgccggaaagccgatggcagttgggggcgatccggaagcaagacatggaattgtgctgactgcgaattatattgcaaagcgagccggagtaaaaacaggtatggcattgtggcaggcaaggcaggtttgcccggaaataatttttgtaccgcctcgcatggatctttatttgaggttttccagaatggcacaggagatttacagtgaatacacagatcagagagaaccatttgggattgatgaaagctggctggatgtgaccgccagtacttctatcaagggagatggaatgaagattgcaaaagagatcagcagtcggattaaatatgaactgggtgttaccgtaagtattggtgtttcctggaataagatatttgcaaagctcggttctgattataaaaagccggatgccattacagagttttccaaagacaattacaaggatattgcatggaaacttccagtaggagatttactcatggttggaagaagcactgaacggacgatgaagaaacttggcatttgtacgattggcgatctggcaggggcagaaccttctatattagaaacatatcttggaaagatgggattggtacttcatacctttgcaaatggatgggataagactccagtttcagtagaaggatatagagcaccaatcaaatctatcgggaacagcacaacaacaccaagagatcttgttagtgaattggatgtgaagattattttgatggcgctttcagaaagtgtaggagccaggttgcgtgaaaatggttttcaatgcaggacagtagaaatctcgattcgggataatggactgtaccatttcacgagacagtgcaagttggacagggcaagtaatcttacagaagaaattgccagaactgcatttgagttatttcagaaaaattataactgggaacatccgattcgtagtcttggtgttcgaggatgtgatctggtgtctgaagagatgccttatcagcttgatttatttatggatgaaacaaaaagagaaaaaatcaaaaagatggaccaggtggcagatgagatccgtggaagatttggttatcagagtattcagagagcatttatgtatcaggataagatactggcacagctgaatgctaaggaacacacggttcatccacaagcatattttcatggataggagagagcaggtgttttgtaatgacagctaaagtgtatgtagatgtcctggcggtattcagccgggaaggagaattgatccctacagcgtttgtctgggaagatggacgtaagtatgcgattgataaggtttcaaaaccggagcgttgtgccagtcgaaaagctggcggaaccggatatcgttatacctgtcaggtgggcgggaaaatctgtcatctgacttatgaagaaaattataaatggtttatggaacgtaaataacggtgccctaaaagggagccctgaatcagggccccctttggagagatagatattcgatgagaacatcagcagtcggggatacatcctttcccgtgagaaccgattgctttcaatagatcatacagttgccggtcagccagaaatagaagctatcccacagcagatatttctgcggaatctgcatgaagagatgttaggacagtgacagactgtgaatggaataaacaatacaatgattggtctggctgcggaagcggtcgggaaggaggacaattatgcagagaatacaggatatgtttatcaatatggaagaagtggcagaggatgcttataagaatacggaattattgttgagtcagtataccaaggtaatgttccgtattgagaagaatcttgtggatatagattatgaaatgtatgcagaagaagggaagcatctgaaggaaatgttatatgatctggtagatttcgatgcgactgcagagaaacgcagaatccaggaaaagcttctaaataatgatatgaatctctgtttgctggaaatcatgagagattccctgatagctttgagggattatccgaagaatggacagctgtattatcggcttttgaaatatagatattttgaagcaggaaataccaatgaagatgtgatgctgatgctggatgatatgccaagtaccacttattatcgaaaccgtaagaaagcaatccgtttgtatgcaacaatgctctgggcatttacacgtccggaaaagatacagaataagatggaggaaataaactggaagaaaagtgggagtaaagtggcagtgaactgacagtaaactggcatgtgaatggcattacaatgaaaatacatgcatgttagaattgatatgctgagagaaatagaccttcgcagacgtaatgtttgcggaggtttttcttttctcaaattttaaggcgtcaggctgtgcccggaagggcatggcctttttttatacccaaaaaacaggttgcagatttgaaaaagcttcctttttaacaggtagatgccggaaaggaagagcatatcaagatgcagggaagaggcagacattatgccagatatccatgatttccgatttgtcacaaatcaacaaaaacgacaaatcggaggaacaatcatggaagaaagaaaatacacattttacgacagatatcagaaggtgaaatacgctaatattacagcagaagagctggaagttcttaatatttcttataataaggaacattatatgttcgatcagcagcatcagagaaataatacagtattattttgtggattagaatcagaaaacagttgtgcgacagactttatcgcagatgatggacgtgacattgcatcagatatcacaacagagatcttcttcaaagaactcttcagtgatctgacagagaaggaaaagaaaatcgtgagcgattattttattatgggaaaacaagttaaggaaacagcagcggaactgggcatcagcacacgtcaggtgagtagagacaagaacagtgctttggcaaaaatgttaaagagaatgaaagcagctggatatgaatcatatgctgaggcggcaggtgcatttctgcaggaaagcgattatattccaacacagatggagacgcagaattctattatgaagaaaaggaccggagaagtgagactgccatcagatcataagatgaaaaaataaattcttaaaaaacaaatcatgataataatgtgatgatatcacagaaaacaaataaaattcagattataataaagccataaaagaaaaaacgaggaggactgtaaaatgtctgctattaatatcaataaaaataattttcagaatgaaataatggattccgagaaaaccgttcttttagacttttgggctccttggtgtgctccttgccgcatggtagtacctattgtagaggagattgcaagtgagcgtagagatattaaagttggaaagattaatgtagatgaagagcctgaactggcaaataagttcagtattatgagcattccgactttagtggttatgaagaatgggaagattgtacagcaggtttcaggggcgagacctaagaatgcgattttagaaatgctttaaggaggtgcgctaatgggcttttttgatttctttaaacaggcgaatattaatcaaggaatagaggaatataaaaggactgccggtgcagttctgctggatgtacgtactccgcaggaatatcaggaagggcatataccagaaagtaaaaatgtgccgttacaacaacttaacaatattgtttcagtagtgaagaatacagaaataccgctgtttgtatactgttattccggagcccgaagtcgtcaagcaactgggatgttgcaacgaatgggatattctaaagtaaataatattggtggcattgctgcttattcaggaaaggtggaaaaataagatgaaggtaataatcgtaggcggtgtagccggaggagctacagctgcagcaagaatacgaagattggatgaacatgcagaaattactgtgtttgaaagatctggatacatatcctatgcgaattgtgggcttccatattatattggagacgtgatcacagacccggaagaacttacactacagacaccagagagtttttttaaacgcttccgtattaacatgaaaattcatcatgaagttatttccatacatccggaacgtaaaacggtttcagtgaaaaatttagagaatgatgagatatttgaagaaaactatgataagctgatcctctctccgggggcaaagccaacacagccaagacttcccggagtaggtattgataaactttttacacttcgtactgtagaagacacttttcggataaaggaatatataaataagaatcatccaaaatcggctgtattggcaggtggcggttttattggtctggaactggcagaaaatttgagggagcttggcatggatgttacgattgtccagcggcctaagcagctgatgaacccttttgacccggatatggcatccatgatccataatgaaatgagaaagtatgggataaaactggtactgggctatacagtagaaggatttaaagaaaaagacaacggagtggaggttctgttgaaagataatccatcccttcaggctgatatggtggtgctggcaatcggagttacaccagacacagcattagcaaaagaagctggtctggaacttggcatcaagggaagtattgtagtgaatgacagaatggaaacttctgtaccggatatttatgcagcaggtgatgccgttcaggtaaaacattatgttacgggtgatgatgcgctgatctctttggccggaccagccaataaacagggaaggatcattgctgataatatttgcggcggtgatagccgttatctgggcagtcagggaagctccgttatcaaagtatttgatataacagcagccactacaggtatcaatgaaacaaatgctaaaaagtcaggattagaggtagatacagtaattctttctcctatgagtcatgccggttactatccaggtggaaaagtgatgaccatgaaggtggtttttgaaaaggatacgtatcgcttgcttggtgctcagattataggatatgaaggcgttgataaacgtatcgatgtgcttgcaacagcaatccatgcagggctgaaggcaactcagctgaaagatctggatcttgcatatgcaccgccatactcctctgccaaggatcctgtaaatatggcaggattcatgatagacaatatagcaaaaggtaccttaaaacaatggcatctggaagatatggataagatttctaaagataaaagtgttgtattgctggatgtgagaactgtaggtgaatttaacagggggcatatggatggattcaaaaatattcctgtagatgaactgagggaacgcatcaatgaaattgagaaaggaaagcctgtttatctgatatgccagagtgggctgcgaagttatattgccagtcgtattctggaaggaaatggatatgaaacatacaacttctccggcggattccgcttctatgatgtagtggttaatgaccgtgtactgatcgaaaggtcatatgtatgtggtatggattattagaaataaacaaaatattttacgattttcacgtagtataaaaggattcccccatttattagaatgactttcataattctgataaatggaggattctttagatgttatagaaaaacaggtttatgatctttgtagtgtttccagttttttcgaatcaaggatggtgattttgccgcgtgagagtttgacgagaccttcgccttgaaagtatcgaagcattcgagtgataacttccctgtgggaaccaagatggttggcgatagtttcgtgagtaatttttaattcatttgtttcttcgatagaggtctcttctaaaagaaatgaagcaactcgcttatccaaactcttccacatgatctgttcaatcagccacatgacatcagaaaaacgggtagccattaactcattggtatagtttgcgacgggagccgattccttcatgatgtccttatagatttcagcagggatgatccaaagatcagtatctttttctgcttcaatggttacttcaaattgaatggactgcatgatacatgaggcggataaaagacacatatccatatcgaacaaacggtaaagtgtaatttcccgtccttcatctgaaagtatgtaagttcgaagctgcccggatttaaccagtaataatccagtacaatccaggtttccgttgtgaatgatcgttcctttttttacatcccgtgtaatcaaattgtctgaaattacttttttctgtactgtatttaagtcattccatagtggaaaataattttcgaagctcataacagttatctcctttacgaacatagtatacttacttttttaagatgcgtcaattacataattgacatatgccataaataaaaatatactgactatagtacatgactgttgtgaatatgagggagggataaataatgcagggagatgtcagttttacatttttggaccgaatcgaagaagtagaactgaatattgtagatagacgatggcagtctgcactggcattggcattgactttgccagatatttgcggaggtattgctttcccggaaattgttaaacattatcgagatggccgggttatgctggatcggaaaaagaatccgacccgtgatgtgggaacccagtatattcgctggtttgatgaatatgcaggggactactttaaactatctcaattcgatgaaaagccatatatttgcggagaacgctgttggcagcttcgatgtgaatatcttcatcaaaataaaggatttttgaatgatgaaaataatatacgctttcatcttggactaaactgtggaatgtcagtttgtcagttggacagtatgaacatacaggagaacggaaacgatattcgtatagacatagaacagttttgtctgaggatgtgcaaggcagcaaagagttattatgataaagttcatttggaaaaagactttagtctctataatacaccagttttggattttattcaggtaacacaaaaaaagaaagctgcttctattattgcgctggtctgtggcagtgaacgttatgcaaaaggattaaaagaagcattgcagtttatttcagagcagatcatgctgttttatacaccggaaagcgctaaaacaaaattagacagacataagccggatctttggattgttaccgaagatatgacgagccaaccgaatcagccatggcgtgcggacaggacaacacctgtaattttaatcacaggcaatcctgatgctgttgaaattaaaaagaattcaggaaaactaactgttctttctatgccattatcaatagttgatttgcggaaaaccgtcgaaatatatgtgtcgtgaggagaagtttatgctgtacataatactattatttgtaattgtatatttgatgatgcttatgcggagacagaaagaaaagatgagtgaaattaaaatacaaatagatcaactgcaagcacaacatgatcgattgcagaaagaaagggatcagttacaagaacggatgaatcatctggaagagcaacgagaacacttgcaaatgcaaacagaccaggcatttcggagtgctgatgaaatcgagaaaatttgcgatgagatatggcatcatgctaataccattcacctttactcttcgttagctgaagaagaaagcaaatctataacaatgaaagaaaaacaaaaagaaattattcgaacaactgaggaaattctaaacatcatatataaatataaaggtaatgtataataaaaatatgtcattgtaatgattagcgttcaaggtaaattcttatgtaataatatcacagaaggatttacctttttcaggtacaatagagatacaaaatttgaaaggggaacaaagcattggcaaaaagagtggcaagtgtcgataaaaaaagatgtgttgcctgcggagtatgtgaaaatacttgtccgctggcagcggccaaggtttaccatggatgttatgctgtggtagaagaaacagtgtgtgtaggatgtggaaaatgtgcaaagtcctgtccggcaggttgtattgaaatgaaagagaggacagcgatgtgaagaaaaagaaacattggtatgattatttatggatatgggcaatcctttattttgctctcggtttttttagtattttgttcgcttggtttgggatgattgatttcctgttgccgttaggaatagcaatattcggtggaaataaatttttctgtaatcatttgtgtggacgtggccagctttttagtaagcttggtggagatttaaaatgctcaagaaataaaccaaccccgcgatggatgagttcaaaatggttccgatacggctttttgatatttttccttacaatgtttggaaatatggtatttcagacatatttagttggtgccggagcatcatccttgcgtgaaatcatcaaattattctggaccttccgtgttccgtggggatggacatacactgccggaacagtagctgattgggtggcacagtttagttttggactttatagtttgatgcttacatctttgttgttagggttgatcgtaatggtgttatataagccacgaacctggtgtacattttgtccaatgggaacaatgacgcagggtatctgtaaattaaaaaataatgaaaagaagtaatactataaggcgatttataaaaggcatatgtcaaaaacattattgacatatgccttttataggactattatataagaaaagcgagaaaggagcagtttatgccgagaccagtaaaatgcagaaaagtctgtcatttccccaatgttttagaatttcttccggcagacgatactgacaaaaaaacacccattgttctgacggtagatgagtacgagacaatccgtcttttggacaagaaaggttatagtcaggagcagtgtgcagtatctatgcagattgcaagaacaacagttcaacggatttacgagattgctaggaagaaaatagcagatgcactcattgatgggcatccgcttagaatcgagggcggggatttcagaatttgtgacggtcagagtagcgactgcagctttggaggatgttacaaacaggaaatttacaaaaaatatgcagcagaaaaaggagaaggtatcatgagaatagcagtaacatatgaaaatggacagattttccagcactttggacacacagagacatttaagatttacgatgtagaggaaggaaaagtagtacattcagaagtagtagatacgaatggaagcggacatggtgcgttggcaggagttcttaatgccttaaatgccgatgtcttgatctgcggcggaatcggaggaggtgcccagaccgcattagcggcagcaggcattaagctttttggcggagtttccggatatgcggatgaagcagtagaagcttttatcaatgaaacacttgagtataatccggatgtgaaatgttctcatcacgagcacaaccacggggaaggacatacatgtggcgagcatggatgtggaagccacagttgtcattaagaagtgagactgccatcagatcataagatgaaaaaataaaaggtattgatctataaagagggaacctgcatcatcaaatttgcttgagatgtcgggttctcttttcgtttgcataatgatatacttttattgtgattaaaaaagcacgtacaaaactcataggagaaagatgtatacttatgacaacatttggtgataaaattagaaagttgcgaaaagagaaaaaaatgactcaacaaaagctgggtgctatggtcggcgtttcttatagaacaattcgagcttgggaaattgatggacgatatccaaagcagagtagtttatatcaaaaactggcagatgcatttcagtgtcaggtttcttatcttatgaatgataatgaaaccgtgtgcttgggtaatgatgagccaagtgaatattctggtgctaaacaggcaaggcagattcttgaacaggcagctgctttatttgccagtggaactatgaccaatgaggacaaaactattttcatggatgagataacgagactttatctggaataaaaaaagaacagaagaaaatggtaagaaaaaatgaactgttttgttttcttgcttgctagaaaagaagaatagaacgtataatagtgttaatgatccagagatatttactctggaaatagaattacttgtaccggtggtgcgagtatagattaggagtgaaagaatggtagaagaaactatgttttccggggagtcgaaaaatattgagtacaaggtatccttacccgataaaagtgaaaaatacatgaagacgattgtagcttttgccaatacacaaggcggcaagctgattgttggagtagatgataaaacacaccagattgttggtgtggaaaatgatgtgttgtttcagctgatggacggaattgccaatgcagtttctgattcctgtgtgccacagattattcctgatattgagccgcagacagtagacgggaaaacggtcattgttgtatcagtagaagctggaaagaacagaccgtattatctgaaatcaaagggaaaagataatggtacttatatccgtgttgcaggtacatcaaggcaggcatttccggagaagataaaagagctggaaatggaaggagccagaatctcatgggatgagcttacttgtgtgggttatcctgtttcagaggaagcaacagagaaactttgtcaggatatcgaaaagttccggaagaaggcaggaatggcagagcattctgtaaagaaagagcagctgataaactggaaaatcttgaagcagagcgagggacagcttctggcaacgaatgcctatgcattgctgacatcagattatttttcattcgccaaaacacaatgtgcggtattcaagggaacagatcgtgcagtgtttctggataagagagaatttacaggaccaatctatacacaaatcgaagaagctgtagactttgtattgagaaatattcgactcggagcaacgattgatggattggtgcgaaaagagaagtatgagctaccaccggaagcaatcagggaaatgatcattaacgcccattgtcaccgtaacctattggatgaatcctgtattcaggtcgcagtttatgatgacaggttggaggtgacttctccaggcggattatataacggattgacttatgaggaagtcatgaatggtcattctaagatccggaataaaggtattgccaatatattcagtcagatgggactcgtagaagcatggggaagcggaataaaaagaatcctgaatgctgcagaagagtatggacttccgagaccgagatttcaggaatttgataatatgtttcgggtagaggtgttccgtaattcatttccgatgacaaatgaaaaagaaagcatcggagaagcatcggagaagcatcggagaagcatcggagaagcatcggaggcagagtggagaacagatctcaacgatacacagcaaaagattataaagttgctttcagaagatcatcaattatcagcggttaagttagctgaaaaaatcggggttgccagtcgaaatattgagaacaatattaagaagttaaaagagtatggtattcttataagacatggatctccaaagaatggttactgggagattgttgataaagatctacaggagtgagaagtaaattagtctaagattagtccaagagaatatatagataaataacaaaaatagattgacattttgtagtaattagtagtaaactgtacttgtggaagggaagtgatatgtttggctagaaaaacaccaaaagatggcaaagaagaaaacatacgagtacgggtgactccagagcaaaaacagagacttgttgagtatgcagaaagacactatcagagcatgagtggtgttgtatgtcaggcattggatctcctgtacgcaagagaagaacaacaaaataataaagagtaaaatggagttattttggagtttatttcttcataagcggtgcgaaaagcacagaatcagaacatatgttcgaactataagcctctaataacagcctttgcgtgtcatgaaatgcagtccgcaaaggagtttgaataatatattagagccaagaaatgcctattttacgggctttcttggctctttctatgtccgttgacaatcaaaagacaatacttttttaatatgattgtaaataatttcttcttatttagctgggaattgactcttccagtctaaatattctttttctgtaatctcttcatttctgaatttctggtacatatcagcccatgttccaatatgatccagcatatttaaagaatcatgtcctttgtccttaaacatgagctgcggtacgccggattcatcacggtaggcgtgcagaccatattgatcctctaaagcaaataatgcgtgcatgacactaacataagtatcaaagtttggatcagacatggcgtatggactgatctttaatgagtttgctattttttctaattgttctgatgatggaaaacgattcccaagttcataatttctaattgccgattcgctcaatccggacatgattgccaattctttctgtgtatatccttgatcgatccggaattttcttattttctcacctactgtcataggaaaacactcctttgctgattgttacttaaaagtataacataaacagttcaaaaatgaaatataaaaataaaccgttcatttttgaaattattctattgacagtacggaaatgaaatgttatgatgcatatacaccgttcgataatgaactgaaaaagaaaggagggatatagatggctagtaaattatttatatcagcaaaagaagtagcgaaagaattagaagtatctgattcctatgcgtatcgtttgatccgtcagttaaatgcggaattggagcaaaaaagtttcgttgttgtcaaaggaaaaatcagccgtaaatattttgaagaacgagtttacggtatgaacgaaatgaaatagcaggaggtgatattttgacagtaatcaaaaaccaaaagtcaaatacttacgaggtaagaacctattataaggactggaccggcgtaagaaagcagaagacgaaaaggggatttaaacgtaaatgtgatgcccaggaatgggaaagagcgtttaagttaaaggagaatttgagtctggatatgtattttgaagattttgtggatctttatctgaatgatatcaaatctagaatcaaatataatacatggctgacgaaaaagcatattgtagaaaaaaagattctcccatatttttcgaaaaagaagttgcaggaaataaaaccttctgatattcgacagtggcagaacaccatgatgaactatcggaataaacaaggagaaggctattcacaggtctatctaaagaccatccataatcagctgagtgcaattttgaatcatgcagttaatttctatgatttgaaaagcaatgctgcacgcaaggcgggatctatgggaaaagaaagaacaaaagaaatgcttttctggacaaaagaagagtatatgaagttcattgaagcggtggcggataagccaatctccttttatgcatttgaaattctatattggtgtggagtgcgtatgggagagttgttagcactgacaccggcagatttcgattttcaggcttgtactatccggatcaataaatcttatcaaagattagaggggaaggatattattacggatcctaagactgtgaagagtaatcgcataattaccatgccggaatttttaagcgaagaattagaatcgtatataggaatgctgtatggtttaaatgaaaatgacaggatattccaaatttcaaaaagctatcttcatcatgaaatggatcgtggtgtgaagttgtcaggagtgaagagaatacgaatccatgatttacgacattctcacgtgtcattgttgatcaatatgggatattctgcggtggcaattggagaaagggtaggacatgaaagtgtggagatcacatatcgatatgcacatttgttcccaacaatccaaacagagatggcggaaaatctaaatcaggaaagagaggaatatctggatgagtgaaaaaaatagggataacaagaatcggtggcgtaatgtaaccatagcgtttcgaatgtctccggaagaaaatgaagagctggatttaagagtaaagctttgtggataccagacgagacaagaatatatcattgaaagtgttttacatcaaaaagtcacagcagtaggaaatccattgatgttagtacagtttagaaaacagcttcgagggattgaagaggaactaaaaaggttaactacattagaggatgccgatgaagagttgtttacacctattcgaacaatgttggagatattaaatgcatttgcagaagaaagaaactatgaaagaaggaaaaaagaaaaagcccagaaataaactgagcaagttccctgatcatcagaataactgatatatcaccttaacaacttgagtatatcacaaaattgttgttgcaacaattgttaaattctgtttgccagggacttgcccggttgggcaggaggtggaaatggaagataattatagagaaataaaaaaggcagaaccatgcctgaaattaatccacatggatcaggttgaagtggaagaaattgaatggctcttttatccgttcataccatacgggaaggtcaccattattcagggagatcctggagagggtaagaccaccgtggtgttgcagatcattgcaaagttaacaaaaggagaagcaatattaagtgaaacaagcgaaggaaaatccgaagagacaggcgtagagccaatcaatgtgatttatcaaacagctgaagatggactgggcgatacaatcaaaccgagattgttagcggcaggggcagattgttccagagtcttggtgattgatgaccaggatcagccattaacaatggtagatgaaaggctggaagaagcgattatacagacgaaagcaagacttgtagtgttagatccaattcaaggctttctaggggctggtgttgatatgcatagggcaaatgagattcgcccattgatgaaaagaatttctgtattagcagagaaatatcaatgtgccattattctgatcggtcatatgaataagaatagtaatggaaaatcatcctatcgtgggttggggtctattgactttcaagcggcagcaagaagcgtattgattgttggaagagtgaaagatgaaccggaaatccgagtgatctgtcatgtaaagagttctcttgctccggaaggagatgctatcgcctttcgattagacaaagaaaaaggatttcattggattggaaaatatgacatcagtgcagaggacttattgtctggtgatggacgagggcaaaagatccgaagtgcgaaagattttttaaaagagatcttagcaaatggatcaatggaacaggcaaaaatagcggaagaagcagaagaacgaggaattaaaaagaaaacactttggaatgcgaagaaggaattacagattgattctgtgaagataggaaataaatggttctggatgttacaagaagagtaaaggaagatggcaagattaccatatcttaaagaatagggaatcttgccaccttgattaaaaaggagtgaagtgatgaaaaaagtacagattgattatgaactgtttcgaaaattgatcttttatcatttgggttcagatgatcagtatgaagaagatattcgaaatggcttggaagaaaaattggatgcattagtcagacatgaactctatacgaagtataagacggctccttctgaggaagagcaggagaaagcacgacaggaatatttagataagcgtggagtgacagccagttatcgatggtgatgtttgttttgggaatatacaacaggagcgtggcacgcacctgtatcataccaaacaaggagaattgctgtagggtgtagccgatacagtactggctgatttgaaagctcccggcagggcgcaagggtacttttgatggacgttaggctgtcgaaagtgcttttgcgttacttttgacaaaagtaacaaaacatgatcgccatatctggcgttttaaaatgaatgaaaggagatttattgaaaaggacaattagttttatgacagggaaaggctccctgaaccataacagtagaaaatttcatgcaaagaatacggatccgaacagaacccattggaatgttgaatattgtaatgaagatatcaaagacgtatatcatgaattatttgacgaagccttgaagcgttacaatgataaacagactcgaaaagatcgtaagatagatgattactacgaaaagatacgttccgggaaacaagaaaaattatttcatgaggttattattcagattggtgataaagacaatatgggatcagaaacgatggaaggacaacttgctgcaaagatattagatgaatacatgaaaggatttcaagaacggaatcctacgttgcgaatatttgctgctcatctgcatttagacgaagcaacaccacatctacatattgattttattccctatgttacaggaagtaagcgaggacttgatacaagagtatctttaaaacaagccttatcgtcattaggatttaaaggtggttccagaagtgagacggagctaaatcaatgggtacaatcagaaaaggaaaaattagccatggtcatgagagaaaatgagatagaatgggatcagaaaggaactcatgaaccacatctttctgtattggattacaagaaaaaggttcgagaacaggaagtagaagaattaacggaacataagaatttattggaacatgatttgcatgatatcagtgaatgtgtggatgagatccaaaaggaaaaagaacaggcagaaaaagagagagatgcggtaattaaaaagacagaagtgttagaaaaacgattttctgcactaaattcaaaagctggacttgttgactcacatgcacgtgagtatggatattatccggaagaatggctgccagaagccggaactttagagtctgcaaaatcttacaggaagagaatatttcctttggtgaaaaaagttgcgaacatgatacaggcattgtatagcaaatatttagaactgaaaagcaaaaatctaaagctatcagatcgaaacctggatcttgaaaatcgtgtagatcggttgcgagaagaagtatctgttataaagaaagagaatgtagctttgttaaatgtggcatatgatatggatcgggttgtagctgttttgggaaaaaataaggtcaaggaagcaatagaagttgcaaagcatttggaacaggcaaatgcaaaacaaaacatcaagaagaaacgtatagacagagatagtagatagaggagttgtagaaaccaaatctatgctaaaaaagtaagatctagacattgctttttggaattgtaaatcaaagagaatagatttatataggtgaagagagaaaatagctttggcaggcctttgagaattaggtgaatgctctataagtaatgtgatacaaggaaaggtaaaatagattttgtggaaatgtgcgttgaaatgtttaagtagaagttctagtacaaaaatctttcattctttgtgttcatgaggtataatgtaagcaacgaattagaatttgatagggagtgtattacatgaagaaattagcattagtatcactaaaaacaattctgttttttgttggttgggctatatgtgtatcagttataccaataccagatacatcgagtgcagtaatttggagattttgggcggaactaataccatttttatctattattgtgttgacacttattttctggatcattgataaaagaaaaatacgattacatctgactggaaaacctgtttataatatcgcattaggatgtgtaacgggagcaatctggttgggagtatctattggaatattatccataataggagtagtacatatagatggcaaaaatcaaatatcgatgctatggttgtggatgatttcggcttttctcaatacgattatgcaagaaatgttagttcgtggctatttatatcagatgataaaaagtaaatacaatatagtggccgctgttattgtatctactggattatttacatttgcacatggtggtgcttttgaagcaggaattcttccagtacttaatgttataacaatgagtctttttatgacagcagttttggaatacacagactccttaattgctccaattatcatccattttttatggaatggtgttggtgcaattattttgggtggagtgtctttggcagaagattatccacatttgttcaatatagtaattagtggcaatcctcttttgtctggtggtagttgtaaaattgaaggtagcatagttgtatttattatgaatttgatactaacaattggatttataatagcaaaaaaaagaaaaaaagaaagttataatttttagattacgggaaagagagaatgttttcagaaaggatttaaatattataatttaagttaatatgtaggtaagttactgacaataaaatgacaatacaattagatgaaaacatggcgaatctacgcaaaacagttcaaaagtgaactgttttaaggctgaaataccatagaaacactacaaagcagatagaactttgcgaactggaataatatattagagccaagaaatacctattttacaggctttcttggctctttctatgtccgttgacaatcaaatgacaatactttttttatattattgtaaataatttcttcttatttagctgggaattgactcttccagtctaaatattctttttctgtaatctcttcatttctgaatttctggtacatatcagcccatgttccaatatgatccagcatatttaaagaatcatgtcctttaggtgaatgctctgtaagtaatgtgatataagaaaaggtaaaatgaattttgtggaaatatgctttataaagtttaagtaggaactctggaaaaaatcttccattctttttgttgatgaagtataatgtaagcaacaaatttgaagttgacgagggaaattatatggaaaatttaagtggatatagatactgtattgctatgaaaaaaggtcgaaaaatattaaatatgattgtgggctgcttaatgattcttataagtatcattttcataaccgcaactgtttttagctgtatttttatgcaggaatttgtttattacacatttttagcaatattccttataattatacccctacctctttttatttttggaattataggtattgtctcagctacaaaacgagttgaagtttataaagggaaagtgatttatcatattggttttaaaaacaaggaatatcgtatgtctgatattcaaacatcaaaaacaaaaagtgaaacatatagaacaggattagattatggaaatattgtacccatctacagttatgataaattaactgtattctatgataaaaaagggaaaaagatttttaaatttggattggcatacgataatgtagaacgactgaaagccgatgttaataacactcaaaaaagcatcgcaaaacagcataacaagaactgaataaatcccagtttgtaggggaatggaagtgctttatgaatattatagtatttaagattattagttgattttaatgtatagcatattgctgacaataaaatgacaatacaatcagataaaaacatagcaaatacatacaaaacagttcgaaaatgaactgtttcaaaactaaaacaacttgaaagtactacaaagcaaatagaactttgcgagtttgaataacagacagaaaacctcggatgcccattttataagggtttccgaggtttctttatgcctgttggatctatttcctttgacggagtattttttatgcgttaataccgaaaaacttctccatatcctcttccacagtgccaattcctgcaatgccgaagttctcgatcaagacctttgcaacattcgggctgagaaatgccggaagtgtagggccaaggtggatattcttcacaccaagatataaaagagccagaagaacgataactgctttttgctcgtaccatgcgatattatagataattggcagatcgttaatatcgtcaagctcaaagacctctttgagtttcaaggcgattacagcaagggaataggaatcattgcattgacctgcatccagaacacgtgggatgccattgatatcgcctaaaggcaacttgttatatttatattttgcacaaccggcagtaaggatgacagtgtccttcggcagagccttagcaaattctgtatagtagtcgcggctctttgctcgaccatcacagcccgccataaccacaaactttttgatagcaccgctttttacagcttctacaactttatctgccaaagccagaacctgtgcatgggcaaatccgccgatgatttcaccggtttcgatttcactcggagcgacacatttttttgcatgctcaataatcgcagaaaaatttttttgttcgccaatttctcccggaatatgtgtacatcccggatatcccgcagcgccggtagtgtaaagcctgtttttgtaactatccttaggaggaacaatgcagttggttgtcattagaataggaccgttaaaggattcaaattcttctttttgtttccaccaagcattcccataattaccaacaaagttaggatattttttgaaagcgggataataatgagctggcaacatctcggaatgcgtatacacatccactccagttccctgtgtctgttctaacagcatttccaaatcgcgcaggtcgtggccggataccagaatgccggggttctttctgacaccgatatttacctttgtaatttcggggtttccatagctgtctgtgttagccttatccagcattgccataccggatactccgtattttcctgtttccattgttagagcaatcagatcttctacactaaggttgtcattcagcgtggcagccagtgctttctgaagaaatgtgtcaacttcatcgttgtccttcaacagcacatttgcgtgcttcgagtaagcggaaagtcccttcaaaccgtaggtgattaactcgcgcagagagcgaatatcctcgttttcggtagaaagaacaccgacagttctggctttttcttcccagttttcagatccgttccattttgcggcttcaggcagaacagtcagattggtaacttgctttagcagaacttccttttcggtcagtgtagcacggattcttgattcaatgctctctttatcaaaatttgcgttggtaatggtagtgaacagattcagagtaatcaagtgattgattttggcagatacctgcttaccttcctgacgcaatgcagtcgtaatagccgaaattccttttgtgacatagatcaacagatcctgcatggccgctacatcaggtttctttccgcatacgccggacatggtgcagcccttgcacccggcggtttcctgacactgatagcaaaacattttttgttccataatatgcctcctaaaaactattaaaatttgaaataatgtggtttcttctcaatcaaaaaagcatatagacgcgtttgaattaatcttcccaggcgattgcagacacaggacacgagtcgatggcctcctgtacagcaccttgattttcagcgtttgctggttgatacgcttccgcctttccctgctcgttcatacggaaaacctcgtcgcagatccacagcaaagcccacagccaatgcagagatccttatctacttttgttgctttcataaaatcaccttcctttgtcaattttgcgtttgattaaaatacaactactaaaagcatcttgaacgcttcctgcccatataccgcatggggatggcctgctggcatgacaatagattctccttcgtgcagcagatattcaacgccatcaatcgtgatttttccgataccatccaagcaggtgacgaaggcgtccccacccgattcatgggtgctgatctcttcgccctttgcgaatgagaacagggtaatacttactgcctggttttgtgtcaaagttttgctgacaacctgcccctcctgataagaaatttgttctctcagcatcagtacttctgattgagcaatgtttttcatttttttactcatagtatctctccttttattccaaaattttaccacccaacgaaatcgtaacaatctgccaaggaatgaattttccgcttgcctgcaacgcttttttggcagctaattccagtccgccgcagcagggaacttccatgcgtacaaccgtcacactttgaatgttgttgttttgaatgatctgcgtcagcttttcgctgtagtctatgctgtcaagctttggacagccgataatcgtaattttcccacgcatgaaatcctcgtgcattctggcataggcgtatgcactgcaatccgctgcaattaacaattttgcgccgtcaaaatatggtgcattagtcggtactagtttgatttggcatggccattgtcccaactgtgattctgtctgtacccgggcagaaggagttgtttcttgtgaatgttgaatacgctgcattcgactgccggggcagcctgtatggggaacagcggcatgattgcttttcgctttttttctcatattttcctgcacagctttttcatcataggcggcagcttctctctccacaaaggaaattgcacctgtcgggcaggttgacagacaatctcccaaaccatcacaataatcatctcgcagaagtgttgctttgccgtttaccatgccgattgcaccctcgtgacaagcttcggcacacgcaccacatccgttacatttttcttcatctatttggataattcttcgaatcattttataccatcctttctcttgtctttctgggcatagtatattataattaaaaataaaaatctgttgttataacaacgaaagggtaaaaaatatgaaattatccgatatgcagctattccgtgggttagaagaagatgacatctcctcgcttttaagctgtttgaatagtgtaaaacgcaattataaaaaaggagaagtaattctttcagaagggagtattatagagaatatcggcattgtactgtcaggcatggcaatgatatcttgtaacgatatttgggggaataccagcattttaggaagtgttgcacctggttctgtatttgctgaggtatatgcctgtattccgggacagccgatgctggttacagtgtctgccgtggaagatacctctgtgttgtttatgaatgtgggacgtgttctgactacctgcacaaacgcctgcccttttcatacaaaccttgcacgaaatctactgactgtctgtgctcataaaagtctgcaactttcacaaaggattttgcacaccagttccaaatccatacgaggccgattgatgtcttatttttcagaatgcgcaaaacatgccggaagcaattcttttctgattccatataaccgccagcaattagcagattacttgaatgttgaccgcagtactatgtgcaacgagctttctaaaatgcagaaagatggcatgattgaatataaaaaaaatcgtattttgctcaaagactgagatttaaggaatggtatgaatttgaatagggattgattttttaagcaaaatctcttatgatctgaaatagaatatagtgctattatccacagttacagagcaagtgttattaacaccgataacaaaatgataacattagcctgtataggcaggataatatggataaatcaaataatcaaaagaactgtaaacacgacagagaataatctctaaacaaaattgattagtaattgtcgaatttgaataataaaccaaaccccagagtgccctatttttttattccgtgatgttaaaactcagaaatttccgctttttccgcataatttcttatatttcggtatggttgtattggccataaaatcatccaatttttctatgctgccattaaccatctcgcacgtactgatcgcatccgaaaaaacagctagaacaaaatccttcatatccggatccggcctgaaggtagaaataatatgaatgattgaatcgccaaaagctatcaaatcaagatatgctgatataggatatccgtacaactcttcactatctatattaattccatatttggagaaaatattttggttgttcttttttatatgttcgtttccatcatctattgattttttgagaagatactggcttgcttttgatagtggagagccaggaaccatatcaacaaagatatcgttaggaataatagaatttgtttttctctctttttcgtattcttcctgcctaatcatcacttctgttttatcggcaagagccttatcggaatccggatacaagtgagaataagtatcccatgccggctatatctttccccgaaccagcatggcagttaagggcctggtgtgcgagctgccgcccgtggattctggctatcgtggagagagccatgtcattatcagcaatgtcagcaaccaaattcaggaactcaccaaaggctcccgtgtagggcagctcgtaattgccccggttgttattgcagattttgtgacggatctgggtgcggaacgtggtacaggaggattcggcagcacagggcaataagaataccgtttgatatgcgcgcacagtttaagtgtgcgtttttcttacccaaaatctaaaaaaatgaaggaggctatatgcagatagaggaatttaaccaatatgtgaaagaccacatcaaagaataccttcccccggaatatgagactgcaaaggtttctatccaggaagttacaaaaagcaatgaccgtatgttgaacgggcttaccattcttcgagagggcgagaacttttcacctacggtctatctggaaccttttgcggagcaggtggcacaggggcgctccttggaagataccctgcgcgagattacaaagatccagaccgttcaccatgcacatgtaccggtgaacatttccacttttatggattatgctgaaacaggtggaacggagcgaactatccgcagatacctttatggaagggatcacggaaatgtgccgggaactggtaaaagaacatactgcaccggaggaacgatttgccaaactgttcccggacgctaaaggaaagcaggatgctgtcggcacctgtccccgctgtggtgcacctgtgtatgagggcaaaaagggctttttctgtgataacagggattgtgcctttgctctctggaaagacaataagttcttcacttccaagaagaaaaccataaccaaatccgttgcggttgctctattgaaatagggctgcatttccatatccgggctttacagcgaaaagactggcaaaacctatgacgcggtagtggtgctggatgacacgggtgacaagtatgtgaatttgaagctggaatttccagcagcaaaaggcaggcggaaatgagcggcccggcatcacgggaactgacacgatctgaacgggcagcgatccggcggctggtaaacaaatgtgccaactatgacagcacggataaaatctgccttctgctggactgcccttgctatagagtacttccatagtctacttgtaagccgttagaaagaactcactatgaggcatgaaaatctgacggggtaaataagttcctgtgaggtgaataaaattagtggctacattttggctacaaaaacattacggacgaagtggattatgcggataatcaatcataaaacacacataaaacgaattgataatacactttataagcatttgtacgaatgtaaaagacgagttcgaataaatttgtgccaacagcatataattttaatggatagttctcttgactttccgctttgtacttgttagtatattgttacaaagaaagtttaccactgaccgatatgtggtatataaatggtcgggttgaaagtttaccgctgaccgatatgcggtatataaatggttgagttgaaagtttagtcctttgccgaaaagcgagggactttttccatatttccgcagagaggatggacaaatgaagaaaacagggttttacatcataaaggacagattttttgaagatatgcctgatccgtatctcaaggggaataaggcaggtaatagaccacattattattgttttgaagataagaatacgggaatttattggatgataccattcaaccccaaatttgagtaagtgaagatttgaagtagcatataaaacatataacaattctgtttgtttgtgaggaatatgctttgtgcggttggggaggggctggaggggattgtgaattaaaaaagatatcattcaaatagagatgagtaactacttcatatttgataaacctagattaggaggatatattttacgtgaactataaagaaaacactttatgttatgaggaatattgtaaacttcgtgaaagcgttgggtggataaatttttcaagaacacaaactgaaaagtcactccaaaatagtttatatacagtggcagcagaagaagacaaccaagtagtcggtatgggaagagtgattggtgatggaatgtattatatgatagtagacattgtagtacagccggcttatcaacaaatgggcattggcagtaaaatacttaatatgataattgaatatgtcgatagtgcaacaccagacggaggccgttgcagtattcaattgattgcagaaaaaggaaaagaaacattctatgaatcaagaggatttaaaataattcctcatgaattttgtggatcgggtatgaggaaagttattcgtaagtgaagtttaggttgtagaagagttggagtgtcgtctaaaagtatttaaacattgtaatataaaatcatcacatgaattttgagatatgcagtgtatgttgttaacaatacaatttgacgaaggaatagcaaatatatataaaacagttcaaaaatggattgatttaaggcaaaaataagggataagcactaccaagcaaagagaagtttacaagtttgaatatatgagccaagaaatgcctattttacgggttttcttggctctttctatgtccgttgacaatcaaatgacaatactttcaaatcttagaaaagaatattatttacaagcttttaaaacttccagcaaaaatctccacatgcgttctacagaggcaaggtctaatttttcattgatggaatgaatatccaggatgtttggaccaaaggagacagagtcaagaccttcacagtgaccgccgaagatgccacattccaaaccggtatgaacagcctccactctaggttcttcttcgaacatttttacataaacatcacgcataagagggcgtaacttagagtttggatcgtatccccatgctggatattcgctgtcaatgatgtagcgaccgccagcaagttctaccaatgcaccaactctttcgcaaagggattgtttctttgtttcgatagaacttctaagaaggaattgcatgaatacagaatcttctctggtaactgtaacgccaagattcaaggatgtttcagattgtcccggaagattgcgatcggagcagattagtccttggggtactgcatagataaatttcataattctagaagaatctgctggagcaattaccgcaatgttcttttgacctgcatttgtaatctcgatgttcagaccggtttcgtcattgctgaattcttttttccaaatggcttcttcttttctgacagctttgataaattcttccgcctgagcgctgtctaccaatactctcattttagcactataagtgatgacattatctttttcaccaccatcaatagaaatcaaatccatagcaaatgtttttgataaatggatatacatacgggaagaaagttttactgcattccctctttgtttgtggatgtcagaaccagagtggccacccaacaatcctttgatccaaagttcgatttcagtaccttctttttctactttctggaaatcaaatgtaacatgttgacggagaccgcctgcgcacccacatgtcaaaacaccttcttcttcggagtcgatattaagaagacgacgtcctttcaagagagtcatgtctaatttttcggcgcctaacatagaagtttcttcatctacagtaaagacggcctcgattggtgggtgagcaatagtgtcactggcaagaactgaaagtgcgtaagcaattgcaattccatcatctccgccaagactcgtattctgtgcatataagtaaccattttctactttcaagtctaaaggatctttcatgaaatcatgagtggaatccaaagttttttcgcagaccatatctaaatgtccttgtatgattactggcgctgagttttcaaatccttctgtaccatctttgtagatgatgacatcattatattcatcttgtatatagcgaagattgtgatctttggcaaattgtacacaataatcactaattgcttttgtatttcctgatccatgaggaattttgcagagttcctcaaaatagcttaatacgtttgttggttcaaatccttttaaaactgacatattcaaaaaatcctcctgtcatttatgatgttttttaaaaaattcccacaccggcaattcagcgtgggaatttatgtgctaccttagtgtagattatcgaagtaacgttcctacaaagattccgtagtagttaccaattacatatcctaatgtaccaacaaggagtgctgggacgattaaggcgttccatccctttgcaatcgcaagagcagcagcagttgttggtcctccaatgtttgcattggatgcaatacagatttcttccagattgaacttgaaaagttttccaaagaggaaagaaatcaacatgtttgttgcaacgatgatcgcacagaatacaagaagcaatggtgcctttgtaagaatcaggtagatagaagctggagcaccgatgacaccaaagaaaatgtggatcataaatgtaccgatttcttgagcacctgcgatttcaccaacctgtgttgggaatgcagtagctaaaatcattgtaagcgttgtcatgataagatatttgttaccgatcaatccatttaacagagctaatacaaaattagatgttgggatgattcgtccaaagaacgcagcaatctcagtagaaacagcaacaatcacaaaagagagtgcaaaggtaaatgcaatatctttgagagcgaccggtttcgctgtccaatagctttgtgcgtgattctgactttcgccatttgcagtacgtttgtcaatttcatcctgaagtggatgcctaaaatgttttctaaagaagcttactgttgggattgcgattaaagcgaaaaagtaaagtgccattagcaagttgtcagcgacaacggatgtagatactaattcgctacctgcatcaaatgcatctgccatagcaacaaggtttacgcttccaccagtatatgttccgaccatcatggcagttgccttgttgagttcaggaataaagttctttaacgcaaagaatgcaagaaatcctccggctactgttccgattccgctgatcagatatataatgatcagacgtccagagtcctttgaaattttcttaacgttagcttgcaaaagtagcattggaattgcaagtggaacaacgtagtcccaaacgaagtcgtatgctgctgcttctgttggaataattcttaagtttgataaaataagacatccaataagtgccagcacgcatcctgtgatttttgaagcccattggtatttttgctccaaatagattgctaatgcagcaaccgctaccaaaatcgcgaataacccccaagtattttccgcactgattaaggttttcatgtaattcactcctttttttgatatattatatgaataccttcttaatacatatgataactctttaacagaataattgcaagtgttttgaacaaaagtcaatcaaatcagaaaatatattgatgtattttgcacaaataatgtattttgctgacaatgggaaggagtattgttttttggggttccggaaactacaataaaaatagtttctgaacttttggaagaggcaattgatttgatagaagaaaaaacatgcctatttcaaaacagaaaaggattctctatgcacagaaaacttggaaaatgggattgacaagaaaacttggcggagatataattgtgacaacaaaacttgtcaatttgaaatggaggtgctgatatggaacgagatgagattttgaaaatggcacagaaagaaagtgaacattatgatgagagggaagtatttatacaaatgaaagggtacaattatgggatggtcgcctcagcgattgtatttgcttttctcgtgatactgaaagcttttagaggagagccgatgtatgatattcttgcaatgtatgagacaacactggctggattttatatatacaaatataaaatggagaagaaaaaaaggatttgtttttggctatatgttggggaatgacaacgattatcaatttgtatctggctatttggaggcattaatatggatggcgaattgatattgaaaaacaacttaaagaatgctagagctgagagaaaactatctcagatggagcttgcagagttagttggagtgtcgcgaaatacgattagttctattgagacaggtcagttcaatcctactgcgaaactagcattacttctgtgtattgctttagaaaaaaagtttgaagaactgttttatttttaaattgaggcttatgaagaaatgaatgaggagcgcaagtcaaagcgctcctcattttactattctgtgtagttgaaaggttccgcagatgtttccatattgcaacgagaaagtctagctgtcttgagctgatagaacagtgcgcaaagacctgtaactacaagtgctacaagaacccatccaagacccagagagtacagtggaagtgcatggagcaatttgccggcaaatccaaaggaaactccaagattttcaagtgcatatgcaacgctgaggatacttactgcaccgatggtgcatggatagatataagtgatattttttatccagcgatgacataatccaagtaaaatcagagtgatggagactggataaatagcatccaacaccggaacggaaatgcttaaaatcatatttaatccctgattacagatgataaaagaaaatcccgcaatcaataatacccattgacgataagataattttgtagtcaatgtcgaaaaatattgtgagatggaagtaatcagtccaacacaggttgtcaagcatgctaatgtgaagattgctgccagtaaaactgcgccggtatcaccaaacagttggtgaacaatgcagcggagtgtccatgcaccattttcctggattgggaagacacctgaggaactcattcccatatatgccagagataagtacacacatgcaagaattgttccggcaaagattccggtcatgacagtgtatttcatcacaccttttttctctttcacccctaaacttctgattgtagttgcaattacaagtccaaaatttaaggctgcaatggtatccattgtaagatatccttctaaaaatcctttgacaagtggattgctgctataacttacttgagcaggattgactttcacggtgcctcggaataggaaattgacaaatacaaaaaacagtaaaagtagcagtgatggtgtcaaaaattttccgattcgttctaccagtttatttggagctaatgcaagccagctggcagtcaggaaaaagactaaggaaaagagaaacataaatacagtcaaattcgcattttccggaaggtatggtgcaactgccatctcaaacgggagagaagccgcacgaggaattccaaggccaggtccgatagacaggtaaatcaaaatagtaaagaaaatggcaaatttaggattaaccttttttgcgagctgctctagtccatcaaattttgcaacaacaacaacacccaggacaggcaatgccactgctgtaatcaggaaggttgcaattgcaaatggagttttgtctcctgcgttttgtcccaaaaatggagggaaaatcaggttccctgcaccaaagaaaagggaaaacaacataaagctgacgagtaaaatttgtttcttttgtagtttcatagataacctccttaaaataaaaaaaatcgccctagaaaggacgattgaagaccgtggtaccaccttaattcctgagaaaatctcagctcatatccgcatcatctaatgcgtctcacctgtaacgtggctttactccggcgctcctactttgtttcagtttgcttctcaaggatgatttcatctgtcaggttcattggcaactcgcaccacccgttacctctctgaaaaatccgctgaagactacttgttcctatcaaatgaatttgaaatatttttctgtattataggacaagatgagagaaattgcaagagattttttgaaaaaagtaaaaaaagtggaaaaatatgtttgctggtacgggataggggaaagtgaaatttgaaaatagtatggttttaagaggttaataaatagaaaataacattaggtgtacagatttttgtacatctacttttttataatacaaacataagaaaatatcagaaaattatatcatatggcagggaaaggaataaaagataatgagagttgtgagtatgcaaagtaaagcaaaagtctatcaccgcgaggaatgtagatatgcaaaaaagattcttcctaaaaatagaatgcagttaagcagtgaggcggcggaaaaagcggggtatcatatttgtccgtactgtgatggaatggatgcattgtttcgcatgaagaaggaacagattttaaaatatgcaagaaagaatcatatggaggtagatttgttgaatcatgttctgtatgtacgaacagatgttggatgttggaagatgatttatagtatgagcgaacataggtttttactttatcataaaaattatatgcagggagtgctctcgcttgatgaggttgaagaaggagcttatcataggcaaagagatgttcctttttcaaaaagtatagaaaaatatcttttttatataagcaaacatgatgcagcccggaaaatagagatgatagattatagattgcttcctaatagaacaaaaaaggagaagcgatattttgccagcgcgagggcaagaagtaacagaagatctcaaaggcgcttggaggaattatttacaatgattgagcagggagcataaggaaaaagataaacagatcggactttagggcaagaaaattatgttataataataccaatgagttttgagacttatttgggaggaaatgtgttatgggagtgtatgagacgaagcttagaacgctatatgtaatgcggattttagcagaaaatacggatcaagatcatattttgaatgctacagatatttgtaagcttttggagcaacagtatcaaattcacgccgatcggagaacgatttacggagaaatagaagcgttgagaatgtttggagtagatattatacagcaaaaaggaaaagcatctggatattatattggggaaagaagctttgaatttccagagctgaaattgcttgtagactctgttcagtcctctaaatttattacagagaaaaaatcaagagaacttatttttaagttggagaaactttgcagtacgtttcaggcagaacagttggcaaaacaagtaaccattttaaaccgcttgaagactgaaaatgaagagatttattacagtgtagataaaattcattccgcgatatataacaacaagaagattcaatttcagtatgcagagtggacgccaaaaaaggaattgagatttagaaagaatgggatgttttacaagattagcccttgggtacttacttgggatgatgaaaaatattacttaattgcattcgatgatgtggcggggaaagtaaagcattacagagtcgataagatgaagcatttggatatttgtgaggaagaccgggaaggtcaaaaacaatttgaaaaatttgatccatctgaacttacaaagaaaacatttggtatgtatggaggaatggaaataggagtaaaactcttatgtcaaaatagtttggcaggagtgatattggacagattcgggaaggatgtctggatgagaactgtcgatgaaaatcaatttatagtacatgtaaatgtggtagtcagccctcagttttttggatggattacgggagtaggggctcatgtgaaaattgtggagcccatggaagtgagggaggcatacagaaaatatttggagacgatattagaaggatatagggtgtaagataaatttttttgtaaaaagtattttaacgaaatatattttggggttaattagtacgaaaaaatatgatatattgacaatatgagaaaataattaaaatggtcagaataataaagtgaagtaaataagaggagtatgcgaatgattttatatcatggaagtaatgagagagtggaatatcctgagattcggaaagcgaaatataacaaagatttttattttggattttattgcacacgatatcaggaacaagcagaacgatgggctacgagatatgggaaaaaggggtatgttaatcaatacgaatatgagccaaatgaaaaattgaattatcttttatttgaagaaatgacagaagaatggttggattttattgtagcgtgtcgtcaggggaaatctcacaaatatgatattgtggagggaccaatggcagacgatacgatttataattatatacagaattttattgatgggaaaatatcaagagcggcattttgggagttggtaaggttcaagtatcctactcatcagattagttttcatacgatttctgctctggatacactgaaatttgtaggatgtgaggtggcacatggcaagaaaaaataacaatcatttattttttacatgtagtttgattgaatacattggaagaaaagtgaaaagaacacgaaagcaggtggtggattttcttggggaagaacggattgagagaatttatgagtacgcagatgtgttccattgtgagccgattgaaaaagtggcggatgaatttatagaagaaagtaagatcacattgggaaattttgacaatgagaaggagtgtaggtatttagttcctgattactggaatataggagaagtatatgagcgtttgatagaagattcctatgacgatgaggaaattataaagggaatttgggaggtgtatcattcatggatcgatgagcatatttcagattataatacagacttttattatcagccgcgagattatattgcagcgtgttatgaggaaggagtgatcttatgatgagactgaaaaaagaggtgagaatatgggaatgggagtaaaggtaagagtctggggagattatgcattatattcacgtcctgagttaaaagtagaacggtattcttatgatgtaatgacaccatcagcggcgagaggaattttggaagtgttggcttggatccctatgtaggatatcttcatacagaacgtccgggaagagcttcattgtcattagatttaattgaagagttaagagcggtactggcagacagatttgttttatcactgattaataagaaagtaattaccgggaaaaatttcataacaaaagaaaacggtgccgtactgatgacggatgatttaagaaaaaagctgttggcagaatggcagaacaaaaagaaagaaacattgacacatccatatctcaaggaaaaaatagagtgggggatggttccttatgtgcaggcaatgttactggcgagatatttaagaggcgacttagacagttatccggtatttctttggaaatgaggcgaaaataggtatgttagtgctgattacatatgatgtaaatacagaaacagcagctggaaagaaaaggttacgccaagtggcgaaacaatgtgtaaattatggtcggcgagtgcagaattctgtttttgaatgtattctggataacgcacagtgtgtgatgcttaaggcaaagctaacagatattattgatgaagaagtagatagtttgagattttactatttgggaaatcaatataaaacaaaagtagaacatgttggtgtagataaaggaattgcagcagatggaatactgattctataaatgaatgtgcgagtagtaagtgaacataaaaatccagagagattcgcaccagaaaaaatgcacaaaaagtaataaatgtttcttttcgttaaaaggaaagagagactttctaaggtttaattaggaaattgatgaaatgaattaaaaaataaaagtcctaaattggacaaaattgctgtcactcccttcgcgggagtgtggattgaaatccaaaaacatgaaattggaacacagacaaaagatatcactctcctcatgagagtaataaatgaaattttttgcaatattttagagaatacaaatatcaataaaataaatttttcatcatctgttacatatagaaaaaggaatttatactttttatttctgaaacatttattcatataaattgtaagcaataaaacaaattgcaaatcctccccctctatagtatcatattactcataaccatttttgaaacaaaaggagaaatatcatgagtaatgaagttttagcagtcgttgcaggtaaggagattacaaatgcggaattggatgcatttttacagaatgctccaagagaacagcaggcatatgttacaaatccacagtttagacagcagtatttggagcagctgatttctctgcacttatttgcgcaggcaggggaggatgcaaagcttgaggagactgaggaatttgcgaagattttagaaaatgcgaagagagatattcttgcgcagctcgcgatgagagagacattaaaggatgtaactgtgacagatgaggaagtggcagcttactatgaggaaaataagcagcagtttacaaagggagagacagttagtgcaaaacatattttagtagattcagaagaaaagtgtacttctgttttggagtctattacaagtggagagaaagcattcgaggatgctgcaaaggaagcgtctacctgcccatctggtgcaagaggaggagatctcggagagtttggaaagggtcagatggtcaaagaatttgaggaagcagcatttgcagctgagattggtcatgtggtaggaccggtaaagacacagtttggttatcatctgatcaaagttgagaagaaaaatgaggcatctgtggcagtatttgatgaggtaaaagaggcgattaagagaaatttgatccagcagaagcagaatgcagcatataatgcaaaagtgcaggaactgaaagaaaaatatttacaaaaataaatgagtgatacaaagaatgccgtaaaagtggtcgtaagaagcactttacggcatttttcgcatagttcaattatttttacaaacctgtttatttctatcggttatttttatgtagctatgtaacttacattactccacttgcattacccgattcatattcttgggctgttgtattcccagcatctgtttcatcttgcggacggttgcattgtatacaatccagatgatcgggacaagtaagaataagagtgccaggcacacaagcagtgaggcaatttccgtgaaagaaatggtgccgtcatttgcgtacatgatcatggaaaagaagaagtacatagcgaccattccaatgatggaaggggtaaagaagatttttctcgtctgtgcttttacttcttttgtgaggaatgcaggggaagcgccgagtcgtttcaaatcctcaaagacgtagcggttgttcaggacgatggagatacttcttgtatagcagatgatcagcgctgccatgacacagataatggtgataaagaagaacagcatcagataaactgccgttgtgcgaacaaaatcagtggagtccagcattttgaaggaaggcatgtatttccatccgaatcggaaagtgctgccgtcacagtctgcataatctacttttgcatcggctgcatactcaggttcatcgagaaagtaacttttcccattgacggaacgaccatattttacaacgcggtcatagttggatgagattgcgtatttttctccgagtgcatccatgaaaacatggaataatttgtcggcaaattcgtagttgtcttctccgtcaatgttaaacaggacttgatgttccttccattcatcgcctagaccgacttccatattttcgtagtctgtatcgtttagaacataatagtttgagcgcccggagaacagactgtagtgcagatagccgtcaaaagtaactggaagttttttcatcgtcgtcatgttgatgatttgatctgcgccggaggtgagccagtaggtgtcggtctcgtcctcattggaaactgctttgtatgttccgggtgcaacttctgtcttctgaccggttagaaattcaaaagcggaagcggtaaggaaggttccctcattggcaaattcctcatagacagtgtagagttttccgtcgtccgtagttcgttctaccgtggttgacatgccgagaaggatggttgcttcttccttgtaatctttaatcgagaggtcataatctttggcaagatctgcaatttcttcttttcctggaactggctgaccgatgggatagtggaaagaataatcatatggagtggattttacttgcatcgcctgactggtctgtagcgttgggatatagaacagtgcgaaggcgccgccagccacgagcagtgcgatgaccatcatattatttacagtctgttttccatgaaatttcatcatactgcgtgagataatccctttgtatggatgctttttatgatttccgaacccgcgtaccacaatgtgcaaaagaaacatatacagaccgatgaagagcggtatgtaaaggaggggtaaaaatggggatgaaaagcgccggaatactacttgataaatcgttggtccaaaatacccggcggttcctccgagaatcatcagcaaaataccgacggaggcataccatggctttacatcccgcacgggttcatttttgtgttcttcattcacgacatccataatgttggtgcggtaaagtgtccgtcttccaaggagaaatgcaaaaagtaaaatgatcaggataaaggctgccggaatcaggagacagcgaaagtccagaaccaaacgcatctcagtgctatctacaacaagcagacgaaacagctgccagatagaccaggcaaatggaatcccaagtgaggttccgagcagggaagcgcttaaggaagtgacagcagtgtccttgtacagatgatttcgaagtacttttttagaagttcccagtgcgaggaagattccgagttctcttgacttcatgcggaagaagatatttccggcatagatggtaaaaattacgcatccgatgcaggcgagtgcgaagatcatcattgcctgttttctgctgtcgccgccttctggaagaacgagaaggacagtcggcgaagtcaggatcgcggagtaggctgtgatcagtaaaagcgctgtaaagttacagataaagtacagtgtgtaatttttccggttcttttttcttaaggcagaaaaagtatcagttaaggttttcatcgttctcttcctcctcttctaacgtattcatctgttttaattcctctaaaagtgcatcgtgaaaagcatgctgggaactatttcgttccatatttttatagacaactccatctttgagcaggatgacacggtcgcagaaggaggcggaaaagctgtcatgagtcaccatgaagatggttgctttcagagaagcttttgcctccaggaaagaatcaatgacagcgcggctggatttcgagtcaagatttccggtcggttcatctgcgaggatcagaagcggggagttgatcagtgctcttgcaactgcggtccgctgccgttctccaccggaaatttctgccggatatttgcctgcaatctgcgcaataccaaataagttacagagccggtctgccatcgtctcttcctttcttcccacatttcctcggatgatcgcagggaggaggatgttctgccgtacggttagtccatcaagcagcataaaatcctgaaagacaaatcctagtttttcgtttcggatatgtgcaagggcatcttccgacaagccttttaattctttttgtccgagtgtaatcttgccctcctcaaatggaatgtagcaggagatgcagtttaaaagtgtgcttttcccggagccggacgggcccatgacagcgacaaattcgccttgtgcaacgctgagactgacgccttttaacacctcatagctggtcgctccgacctgataagatttatgaagattttttacatacagcatagaaataccacctttctgaattgtttgaatgaaatctgtatggacagaatccggagtttatggaaatttatgatcccggattgttcttttgtgttgctgttgaaaaaagtatagcatggaaaagaagaagtaaaatttgggatggaaagaatggcagttctgatgtaatgtttggagggggatgaggagaaatgtaaaaaatagcagccggaatgtaaagttttgtatccggagagagaaaagcaggaggcgcagagacaaagatttatgttataatgcataggaaaatagatgtgccaggagatggggggcacaatggaaatatgtaaatgtcgcatggagacaaggtattcggtgtgtgatagttcttaattctgtggacattgaggaggtatagatcatgttaagaattggaatctgtgatgatgaatgctatgcaagagatgcgcttcggttggaacttgagaaactcttagaagaaaccgaggagattgtctatgagttttccgggggagagacggcggtcagttggctgaagaaacatccgggtgagattgaccttctgtttctggatgtggagatgaaaggggttaacggaatccggacagcggagcagatccgggaatttgacacaagaatccagatcgtgtttgtgactggttttcgggattttgtgtttgaggggtaccgtgtgcaggcagttgattatcttgtaaagcctgtggatgcggaccggctttccagtgtgctttcgcgtgtgcgcagacagctggagcaggtgcggcagaagcagtttgtctttcagaatggggacggcgtatacaggctttaccaggatgaaatacagtatttttacagtgagaagagaaaagtggtggcggtgacaagggaaaaggagctgtccttctatgccaaactggatgaggtggaagctcgggtcgggagaactttcgtgcggatccatcagcgctaccttgtcaatgcagatgcggtgtcctatatcggcgcatcttcggtgcggatcggaagcgaggaactgccgatcagccgggcgctgaagcaggatgcggttgcagcgcttgcgaaagccatgatcggtggtgatctctcatgatagaaaaagtgattctttcgattgcggagtatttcagggtgtttcagataatctgctcaatctttattgctttggcagtcagctttacgatcgaacgattttttgtggtacgccgacagtggtactggaagcttctgctctttggatgcagttggctcctgagctctatgccgttttttatcggggatctggtgaacctccctccgacggtgctgatatttgtggcgggaatcctgctcggatgtgaaggaagtctgttaaaaaagctgtcactttcctttatgatcatcagcctgacatcttcttttagtgtgctgatagataattatctattgtcggctgacagtggaataccgacggagcaggaaagaatcgtctatctgtctgtaaaactgcttttttacctgatgatctattgcagtgtgaaaaaatttgtcccgaagaaatcctatgagttgtccaatcggctctggagtcttttgggactgttgacgttgacacctttttgtaccgttttgtcggttgtgttgtttcaggagtacaatggtgaaattcttacagcaaatgcggcgttcaataagacgatcctctgtctttgtatcctttcatttgtcggtctgatctgggcagtcgtcgtgttatcccatcagtatgagctggagcagagcagcaggcttttagaaatgaatcagctctattatgaatcattggagcggcagcagctggaagtcagaaaactgcggcacgatatgacaaatcatcttcagacacttgcaggactttccggggaggaacacaaggcatatctcgacaaacttttggatcgtccggggatcaaaaggaatgtacagtattgtgaaaatccggtgatcaatgccgtgctgagtacaaagaccggcaaaatggagctggaacagattgcatttgcgtatgatctgcaagtgccgtccaaaattgacatggattcggtggatctctcggtgttgtttgcaaacagtcttgacaatgcgattgaggcgtgtgaaaaattgcccggacaaaaaagaaaaatttctctgcaggccaagaatgagaaaggattgtttgtgatgaagatagaaaacactgcaaaaagtgaaggaaaaatttcggaaaaggctgcgccgggcctccttccgcagacgacgaagaaagatcggaagctgcacggatatgggttgaagagcattcaggagatcgtacagagatatgggggaagcatggaaattacaaaagaagaggagcggtttgtgctgtttctgtatattccggtgatgatatagcgcccgggatggaactttatctgccccaaaagctgtgcggcagacttatcttggatctgcagaccgcactccctgcgagataaaaagaaggactggtcgacttatccctctttctgtgatatgataatccttgtattaacaatcacagaaagggggattttcatggaaaatatgtctgaggacagagaaaaaaatacggcgaaagagccgtcaaatcatatatgtatcgggttgttggcccatgtagatgcaggaaagacaaccttgtcggaaagtatgctctatctgagcggaaggatccggcagcagggaagggtggaccatgggaatgcctatctggatacttatgaactggagcgtgcgaggggaattacgattttttccaagcaggcagagcttgtgtttggagaactgaaggttacactgctggatacgccggggcatgtggacttctcagcagaaatggagcggacactccgggtgcttgattatgcaatccttgtgatcaacggagcggacggtgtgcaggggcatacggagacactgtggaagctcttaaagcagtatcggatcccggtctttttgttcatcaacaaaatggatcaaaatggtacggatgcagagaaattgctggaggaactgcgtgtgaagctttcaggaagctgtatccggtttggggaagcggaagattcggaagaatttttggaaaatgtagctatggcagaggagcaggtgctggaaacgtatctggaacatggtacgatcgaacggggggagatttccagactgatccgggagcggaaagtatttccgtgttattttggctctgcgttaaaaaatattggggtgaaggaattccttgccggcttggaatgctatgccaaagagcggtcctacccggaagaatttggcgcaaaagtctataagatcgcgcgggatccgcaggggaaccgtctgacatatctgaaagtgaccgggggtgtattaaaagtccgggatctgatacgatatcaggatgtagaggagaaggttagccagatccggatttattccggtgagaaatatgatgcggttcaggaagtgcgtgcagggcgcgtgtgtgcggtgaccgggcttacgaaaacgtatccgggagaaggacttggggcagagccaccatcggaagggccggtgctgactccggttttaaattatcagctgatactcccggaaggatgcgatacccacggaatgctgctcaagcttcgccagctggaggaagaagatccggagcttcatatcgtgtggaatgaggaacttggagaaattcatgcgcagttgatgggggaagtacagacagagattttacaaagtatgatccgggaacgatttcagacagaggtcacgtttggaccgggaaatattgtatataaggagacgatcaaacgtccggcggaaggtgtcgggcattttgagccgctgcgccattatgcggaagtacatctgcttctagaaccaggagaatcgggaagtggacttgtgtttgcggcagactgcagtgaggatgtccttgaccgaaactggcagcggctgattttaacacatttggccgaaaaagagcataggggtgtgctgactggatcttcgatcacagatatgaagattacgcttgttgcaggcagggcacatctgaagcatacagaaggaggagatttccgtcaggcaacttaccgtgcggttcgccaagggttaaaatcgacagaaagtgtgcttttggaaccgtactatgaatttcggatggagatcccggctgaatttgtcggaagagcactgacagatattcagagaatggcaggagaatttcagacaccggatacagagggagactttgcggtgatcactgggagcgctccggtatctgagatgagggattatcagctggaagtgacaagttacacgaaaggaagaggacgactgttctgtactttaaagggatatgcaccttgccacaatgcaggggaagtgatagagcagatcggatatgattctgagggagatctggacaatccgaccggatccgttttctgtgcgcatggagcaggttttcatgtcagctgggatcaagtgccggatcatatgcatttggaatatgtgtggacacctgaggcagaaaaagagaaatcggcaattgaggctaagaaaggtcagggaagcgtacagagtggaagagtttcgagtagtttttcgagaagtgttgaagaggataaagaactagaggaaattttccttcgtacctatggaaaaatagagagaaaacgtccgattgctgagcggcgagtagagagcccggaggaaagacaaaagcggattcgaaaggatcagatggaagaatatctgcttgtagatggatacaatgtgatttttgcatgggaagatctaaaagagcttgcaaaagtcaatatcgaaggggcgagaaataaactgatggatgtgttgtgcaactatcagggattcaggaaatgtaatctgattcttgtgtttgatgcatacaaggtgcaaggtcaggaattaggggttcagaaataccataacatctatgtcgtgtatacgaaagaagcggagactgcagaccagtatattgaaaaagttgttcatgagattggaagaaaataccatgtaacggttgctacttcggataatgtagagcaggttgtgacactgggacaaggtggaaagctgttatctgcccgggagcttcggacggaggtggaagaagtgcagcgccagataagagaagaatatctgaatcgtccgcagaaggggaaaaactatctgtttgattaccttgatgaagagatttccggtcagatggaagaggtccgacttgggaaaaaagaggtaaaggatgtctggggagagtgaagatgcacgaaagtgatgaatggatgcaaacaaacttgatatcattcattcccactttcgtgtttttgttttataacatttcttctagtgtctgataaagtgatagggagttcatttcgtcgattgtaaattcttttgtaaaagcgatgattccatcttgaatctcctggcggctgtaattgtgatccgataagaaattatcggtatattcgttaatatgcgaatagaacgtcagtcccatcagcagatagtctttgctgtcaggttcgacatttgcgtatagaaggttctcggcttcgttgatttttccgccgtctgcgagggaaaggatgcgtgcgaaaatatcatcgcatggggtgtaaagcccatcagagggcagttcatagaccgtatctgacttcccagtgatcagcttgatgaagaagctgacgatacttttgatcatccgcataatataatcttgctcaaattccatagagacccctccttatttccgaagcatagtttcggtgtgatgtagtgttacagttgtaagcatatcaagttggactttgccaacggtgttgtacaatttcgatcagtcaaggaaatctgtgtcatcatcgaactgtctggcaagctttttctggcgatactttgtgaaagttcccattagaaacaaaactacaaacatcaaaaagaaaatactgatggcaaacagggcgcaaatggacagtacatgttcagagccgttgcatgcgagacctgcgccgagtaaaaaggtaaaaatcagtgttccaatcaggctggcactaagataagtcttcatacatggtgtagagtcatatccccaaagccctttcttcacacagccgatcacaacgatcagacacccgaccagaaatgaaatattttctccggcaatctgttttggacctgccccgagaaaaagtgattgcaccagaagtgacagaaggagtacgccccacataatccagaatccagtgcgttctactttcatcatttccagttcctgacgttcgtcaataattttcttcatagctactcaacctcccaaaataaatcgtctaatgttttgcccaaagccttgcagattcggatacatagtttcagcgaaggattgaaatctccggcctcaatcataccgatcgtctgtctggtcacatcggtcatctctgcaagctggacttgcgaaagtccttgttccatgcgggcaatctttagtttcatatttttcatatacggttaagaatctcccttccagccagtagatgcaatgcatgctgctgacttgatttctgtcttcttgtcttcagtatatgaaatatataaaagtatgtcaagtatatattgcattttgtgcaatatagtttgcatacagggcgccgtaaaagtattattttgaaaacaaaagaagacagaaacattgtaaagcaaatacgaaaagtcttgctttgctcagtttctgtcttctgtatcaaatttgcaaaggtatctgtctgactagcagattaattccgcctgtcaaatccatggatccagtctgctttaaaatagtagatgataaataaaatcgaacttaatgtccaggtgatcgggtatgcccagaagatgactttgatatctgggatgatccggacagcgacggtaatgtaagatacacggattatgcaccagcagatcagcataacgaacatcggtatcgtagattttccagccccgcggaggattccggcaatacagtgcgaaaatgcgaggaggaagtagaacaaagtaatggtacgtgcctgtgcagttccaaaagctacaacttgtggatcattgttaaatgcggcaacaaggtatggagcggtaaagaagataatgattccgacaatctctgccatagtaatagaacagagcacaccgaattttgcgcctttttttgcacgttcgtactgtctggcgccgaggttctggctgataaaggtagtcagagacagtgcaaagcatgtgatcggcaggaagccaaatccctcgatctttgagtaagcaccgcagccggcaacagccattttcccaaaggagttgatgttggactgcacgatgacatttgcgaaagaaatgatcgagttctggaagccagaaggaagtccgttagaaataatcagctttagcattggaaagtcaaagcggattttctttaggtcaatttgataatcttctttgcagcgcatcagatggatcaggcagaggattgcacttaaaaactgtgaaaggattgtggcgacggctgcggatcccacaccaaatctgaacacaccgataaaaagcaaatctagaactacatttgtcacagaggaaatgatcaggtagatcaaaggatgtctgctgtcaccgacagactgaaggattccaacaaaaatattatagagtacaaatgcaatggatccgaggaagtagatgcggaaatacagcactgaattttttaatacatctgcgggagtccccatccacctaagaaaagtaggtgtcatgatcagtccgatggcagtcaaaagaattcctgccacaattccaaaagcaacggttgtgtgaatggcatcctgtactttttccttctcgcgtgcgccaaagtatctggcaatgacgacaccggcaccaagtgagataccattgaaaaagccgaccattagaaaaatgagacttccggaagaactgacagcggcaagggcatcacttccaaggaagtttccaacgatcagggagtcggcggtgttataaagctgctggaagaggtttccaaggaacagcggaatggcaaataggatcatccgtttccaaatgggcccctcagtcattaaagtagactttgttttcgtattcataattcagatctctccattcctaaaataatatcttttcttattatagcatgccttccgatcagtgaacaaaaaagttgtatgaatgagaaaaatatattataatacacaataatttgcaacgattgtggaaagagccagacgagataaagacatttacagaggaggaagaaaatatctcgaaagaaagggtacagagaatgggaaaaaaagggattatttttgatttagacggaacgattttggattcgatgcatatctgggaagaaattgataagaaatttcttggaaaaagaggactggaagttccggaagattatttgagaagtattgcgcctcttgggtttgaacgggcggcagtctataccattgaacggtttggatttttagaaacacctgagcagatcattgcagaatggtatcagatggcgacagatgcttatgcaaatcaagtacagctaaagccgtcagcagaggaatatcttcgttatctgaaaaaacgggggatcaagattggaattgcaacatcctgtgaaccacagatgtttttgccggcattgaagcgaaatggaattttggatctgtttgagtcctacacgactgtgcgagaagtaccgaggggaaaagagtttccggatatttatgagagacaggctgaaaagatgggacttttgccggaagaatgtgcagtatttgaagatattctaaaagcggtacaaggggcgaatgcaggaggattttatacggtaggtgtgtacgatgcacattcaaaagatgaatgggaagaaatccaaaggcacgcagacagctttatttacagctataaggagttgatcagatgaagaagattattttagcttccggttcgccgagacgcagagagttgcttgcgcagatcggatatacatttgaggttgtgacaagcgaaaaagaagaggtatatcaaagcacggaaccgcaggaaatcgtaaaggaactggcgcttttaaaagcaaaggacgtggcggagaagactgcatcggatagagaagaagattgtgaccggataatcatcggtgcagatactgttgtggcgcatgaagggaagattttaggaaagccaaaagataaggaagatgcagcgcgcatgctggaagcacttcagggggatgcccatgatgtctataccggagtagctgtgatctgctatgacaaggaggggcaagaagaagtcatttcccatgcggtccagacaaaagtatatgtagatgtaatgacagaggaggagattcagtcctatattgcgactggggaaccaatggataaagcgggcgcatacggaatacaaggcagatttgcagcacatattgcaaagattgacggggattactataatgtggtcggacttccggtgtcttatatttataaagtgcttcgggaaaaaatctgattattaaacatggaaaaagcctttgtttttgcgatttgaaggaagttatagggtgaaaagcaggaaaaaataaaaaaacataggaatgtagaagaaaatcttttacattctctttgttttatattataatactgttgcaatatgcagagatgccggatttatgattctgacatcctgtgcaggaagcaagtaaattaaagaaatagatttggagagtgcaaaagatggaacgtaaagtaggtactatatcaagaggaatccgctgcccgatcatcagagaaggcgacaacctcgcaaatattgtagtagaaagtgtattagatgcagcaacaagcgaaggctttgagttaagagacagagatgtcatctccctgacagagtcaatcgttgcaagagcacagggaaactacgcttctgttgaggcaatcgcaagtgatgtaagagaaaaattaggcggtgagacaatcggtgttattttcccgatcttatccagaaaccgttttgcgatctgcttaaaaggaattgcgatgggcgcaaagaaagtagttcttatgctgagctatccgagtgatgaagttggaaatcagcttgtatctttagacaagctggatgaagcaggaatcaatccatacagcgatgtacttactttggagaaatacagagaactgttcggagagaataagcatgaatttacaggtgtagattatgtagaatattacggacagctgatcagagaagcaggtgcagaagtagagattatctttgcaaacaatccgagaacaatcttagattatacaaagaatgtaatgacttgtgatatccacacaagagcaagaacaaaacgtattctcaaagcagcaggtgcagagcgtgtatgcggaatggacgacatcctgacagcgccggtagatggaagcggatgcaatgagagatatggattgttaggatctaacaagtctacagaaggcatgatcaagttattcccaagagagtgccgtgatcttgtagatgagattcaaaaacagatcttagacaagacaggaaaacatgtggaagtaatggtatacggagatggagcatttaaagatcctcagggaaaaatctgggaattagctgatccggttgtatctccggcattcacagacggacttcgcggaactccgaacgaagtaaaattaaaataccttgcagataacgatttcaaagatttaagcggagaagctttaaaagaagcaatttccaagagaatcaaagaaaagagtgacaatcttgtcggagatatggcttctcagggaacaacaccgagacagctcacagatctgattggttccctctgtgaccttacaagtggttccggagacaaaggaacaccggttgtgttagtgcagggatactttgataactacacaaactagtgtaaaaagcagaaacgagacagcagtaagaactgttaaaagtttataaagactggaaatgaggcattgtcgatgatcagaagatcatttggcaatgcctttttccaatagttcaaaaaatgcaatattttgtataaaaaagcacaagaaaatgtgaaagaaaggtgatacgatacagttagatgaaacagcaaagggaggaaaagaactatggaaattaaaaaagagaatatggagtggcttgcagaagcgatgcactatgtaaagagcaaagtgaatgagaatctgccaaagtattcaacagtttttccgacatcaagttccgaaaacctgatttatggagaaatgggaaataaagattggacagaaggattttggacagggattttgtggcttttgtatgaagacacaaacgaaaaaaagtatctttctgcattggagacattgctccgcacatttcaagagagattagatcagaatattggtttaaatacacatgatattggattcttatactctttatccacacttgccggttataaaattacaggaaatgaaaaggcactggaattctcggtgcgcgctgcagatcgtcttatggaacgatacagtgaaaaggctcagattattcaggcatggggcaatttggaagatccaaaagaaaaaggaagaatgatcattgattgtttgatgaatttatcattattatacaatatcagtgagattaccggagaaaagaaatataaagaagcagcagaacatcatgcaaaacaggctcaaaaatatttagttagagaagattattctacttaccatacatattatatgaatgtagatacaggagaaccgatcaaaggagtgacagcccaagggtattccgataattcggcatgggcgagaggacaggcatggggcgtttatggatttgcgctcagctatgcacatacggggattcttgcatgtgggcttctggaattaagtaagcaccttcaggtcttagatccaagaaagaaagaatatgaggaaacggcagttcaaattgtgaagtcactgtttgaaaattatacaacggagaaagatctttcaaatgggattatcaaacatggagtatatgcaattccatcccatgttggagtcgatgaatgttgtatctggggagactatttttatgtggaagcattaatgcgtttaagaaatgtctggaatatgtattggtaagggagaagaatgagatgattctgcatgcgttggaaaaagtagcatccgaaaaagggttttcggtagacaattatgggatgtattctgcagaagaccagtgtcagttgacatatgtgcaggttgggattcttgcagcagttttattaaatgcaggggcggcagactatgtgatcaccggatgcggaactggtgaaggagctatgcttgcatgcaattcttttccaggtgtgatttgtggacatgtagaagatgcattagatgcttatacatttgcacagattaatgacggaaatgcaattgcaatcccatttgcaaaaggatttggatggggcggagaactgaatctggagtatatctttgaaaaactattcgcagaagagagtggacaaggatatccaagagagcgtgcagttccggaacagagaaataagaggattttggatgaagtaaaaaagtgacttacaaagatctgcctacaatcttaaaagaacttgatcgtgatcttgtgagaggggcattgcaggggaaaagatttgaagaacttttctttgcgaattgcaaatgtgaaacgctggcagaatgtgtgagagaaatgttgaaggaagattaagatgttaaaagtaacaataaaaaatgccgagggacaggaaatattaagtaaagagggagagaaggaaattacatttctctatgaacgaacttatgaagagggagatcgtattgtagtggaaagcagtgagaaaaacttaccgaaatctggcgctgaatgtcaacgatcagtcatgtagtacaacttgttatccacatgtatctgcaaatgtagaaacgagaggagaagctgtctttgcagcagtcaatggagttgacggagtgactgcaaatgaaggacattggaagtggccgtttcaatcgtggggaattaatcgtcgtgaggatgcggcgatcaagattgactttggaagagaagtggagatcgatcggattattctctatacgagagcagattttccgcatgaatttatgattgaaaaaaggaaagtgagctggatagaattgtgcgatctgatcaaagcagacgatccatctccatttccggcgctgacacagattgaagtgtatggaaacgacttgtaagtgaagaaaattccaaaaaagttaccacatccttcaggattgcgctaacttttttttgttgcggttttatttgggtttgcaggatgctgtgtgtctaaagccgctcggaatattaagaagaaaactgagagtatttcttcggtgagatgccgactgcctttgtaaatgtcttcaggaagttactgtaatcgttgaacccgcattcctcacatgcctcattgaccgatttcccttcagcaagcaatgactttgcgatcgtgattcgtttggtagtaatatatttgttgatcgttgtcccggtcgcagatttgaaaatacggcacaggtaggaaggactcagatagaaattttcggagagttcttcgattgtcagtggattctgaatgtgctggttgatataagtcagaatccggtcaacctgttggtgctgcgtcgagcgaaaagaagatgtgacagggaggttgttgtcagagaaaattttattcaaaaataccattaattctgtgaacgtggctttctctataagatctgcgccgaatctgtctgtgctgacaagtttatgaatgaagtactgaaagagcttctgctcctcgacattcagtgaccgcttatgtagattcgggttggatgtatcacgagaagaaaagcagttatccagattggtctgcccagaagaaagctgttttaaaaagtctgggaagatagataaaacaatccgctcatggactttctcatcaatataagttaaatggtggctttcatactgattaatgaagaaaatatcccctggttcgatgctgtagaaccggttatcatcattgtataagtgggaaacagcaaaagttttctgatctaaacaagaagcgattgcttctttacatgaatgttgtaattccatatcaaaccttctcaaaatttgataaaattatagcagattttgtggatttttacaattcgtctttgggtgattgtactcttttaaaaagtatttgctgcctttttcggaaaacacctgctgccgtatattgacattctaggagcgtcaatttataatcaacaattaggggactaacaaatggaggataatatggaacgggacattgcgattggcagaataatcggcattttgtcaaatcagatcaagagacaatttgacagttctgcctcaaagacaggtgtgaccggagtgcagggacgggtgttgcattatcttttgggacagccaagagaacaggagatttttcagaaggatctggaggaagagtttaatttaagaagatcttcagctacgggtatcttacagcttatggagaagaacggatatatcgaacgggttccggtggaatatgatgcgagattgaagaaaatagtagtacttccgaaagggctggaggcaagtgcggcagtggatgaggatatacgatatgtagaatctaagctgcaagatggcctgacagaggaagaattggaaatttttcgacgggcagcaaagaagatgctaagaaatcttcaacagtcgagggatggagaagaaaaaggataattttatcttgtaagggaaaagagcggatagctgcaaggctaaaaatagaattgacaagtgaaaataaccgtgctattctgttacggtgtaaaataaagtgccggatgggctataaattttttctgtttctgatttaaacagaaaagatttatagcctttttgtgtactaaaaaaggaaaagataaaggaggaattgttaaatgaaacaatcagaaaatcaaatgggaacgaaagcaatttttcctctcttgatggggatgtctgttccaccgatgatttcgatgctgattcaatctttatacaatatcgtagacagtatttttgtagctaagctgggagaggaggcgcttacagcagtctctctcgcttatccgcttcagaatttagtacttgccgtggcggtaggacttggtgtagcaacgaatgcagcgattgcaagaaatcttggagcaaaaaaaagtgaggaggcaaatgatgcggcggcacatgggcttgtactgacaggtgttcattcgatattttttattttgcttggaatcttttttacaaaaccatttttgcagatgttcacagataatccgactgtgctggaatggtcctgtcagtattcttatattgtaatctgcctttcgtttggatcgctctttcatattgaaattgaaaagatgtttcaggcgacaggaaatatgtttttaccgatgatcatgcagggggtgggagcgattgtgaatattatccttgatccgatcatgatctttggactgtttggattcccggcgatgggagtacggggagcagcgacagcgacgattcttggacagttttccgcgtgcatgttatccatcatcttgttttgtagacacagtggagggcttcagattcatatgaaaggattccgcatgaaaggaaggattgtcagacagctgtatcttgtggcagttccatctacggtgatgatgtcccttccgtctatcctgattggtgttttgaatggaattctaggagctgtttcccagacagcagttgcggtacttggagtatattttaaacttcagatgtttgtctatatgccggcaaatggaatcattcaaggaatgcgtccgatcatcagttacaattatggagcaggggctaagaagaggcttcatgagacaattaaagttagtgtgctggtgacagcggtcattatggcagtgggaacgattttgtttatgggattcccggagccggttctttctttattcagtgccacagaagaaatgcagaagatgggagcacaggcgcttcggatcattggaactggatttattgtatctacattaggaacagtatttgccggtgtgtttgagtcgatgggaaaaggaattgcgtctctgatcgtatctctgttacgacagctggtcatcattgttccatgttctttgatgctgatcaaggtgatgggagttgcgggagtgtggttgacatttccagtatcagaggcagtggcagcagttgttgcctctatttttctgtaccgtatgatgaagaaaatttagcatgcatagtttagggcggccggatagcacctgtccacaatcttaaagaaagattcagaaaaacaaggtggaattttcagaaaaaagtagtaaaatatagaaaagatacagaaaataaaaccgatacgcacaagaagggggcgtcagtatgaatcaggaattgatcagacagttaaaatatgtgaagcaatgcattgtaaacaaagaaatgcgtggaaatgactgggaggaacaacaggaggctgtcaacaagttggaagaagtcattaattatctcaaagatgaagaagggaaagcggtcgagttcgattcttgatcggcgagacgtggcagccgactgaaagaatgtgaatcgtatatagaagaaagtaacggcagagaagggaagaccgattttgccggatggaaaatccccctgggcagacaaggcgataagcggaaatctgctcggggattttttgttcctgtttccagttgtggacaggaacaatttttatttgcggaggaaattgctgagatattgctattcactttctggatatgatatagttgttgtgtaaaaggaatatactgaccatttttggaaggacaaaacagaagagaataagggagagacatatggcacagaagaagataacagcattgatttttgatatggacggactgatctttgactcagagcgcgttgtgcaacgttcctggaaccgagcaggagaggtgctcggaattcccaaaatgggagaacatatttatcatacgattggatttaatgtggtgagaagagaacaatattttcgcacagccatccgggaagattttccgatggataggtttaatgaactgacaagagcattttttaaagaaatcgtagcatctgaaggtctggcgatgaaaccgggggtgaaagagctgcttgcctatgcaaaagagaatgggtataagcttgcggtcgcctcgtcttcgagaagagaacatgcggtgaacttgttgacagaagcaggagtatactcgtattttgacggtagtgttttcggggatatggtaaaaaatgcgaagccggatccggaaatttatcggactgcctgtgaagtgatccaggcagtgccggaggagacggtagcattggaggatgcaccggcgggtgtgaaatctgcatcaggggcaggtcttcgggcgattatgatccctgatcttgtacaaccagatgaggagacgatgaaggatgtctggaaaaagtacaatacacttctggatgtcttggagttattaaaagaacaagaggcagataacaaaaggaatatgtccgggggaaggaataaaaagagaaaaaggagagggaaatgaaaatgagagaaaaatcaagagaaaatcatagtggaagtcaggctttggcaggacatcgcaaagcactttttctgacgattcttgcgctggcatggccgacacttttggaacagatgctgcagacacttgtacagtatattgatgcggcgatggtcggaagaatcggcgcagaagccacggcaacggtcgggatgagcacgtcggtcacatggcttgtgaacggaccgttgtttgcaatgggaattggatttatggcatttatttcaagggaaatgggagcagaagcatttgataatgtgaagagggcatctgtgcaggcagtgatcgttaccgtggtgaccggaatcggagttggggtattgacacttgctgtcagtccgattcttccaacgtggatgggagtagatccggcgatcaaaaaggatgcgtccctctattttgcgatcatctgccttccgatgctcttccggagtgcgatcattattttcggagcgctgcttcgggcagtgggagatacaaagacaccaatgtatgtcaatgtttgtatgaatcttgtgaatatcgtcctgaattacctttttatctatgatacaagaatgatcaaaatcggtggagccagtgtgaagatgtttggattcggatatggggcagtcggagccggaatcggaacggcagtctcctttgtagttggcggaatctttatgacgattgcactttataaaaaccgatatgtatctccggcgggatgtgaaatccgcccggagcgggaaattatggaaccttgtattcgcgttggatttccggttgcgatggaacgcatggctacctgtcttggtcatgtcgtgtttgcatcgcttgtgacaggacttggaacagtggcttttgcggcgcactcgattgcgctgacagtagaacaggcgttttacatcccagggtatgggatgcaggccgcagcagctactttggcaggaaatgccattggtgcaaaagaccagaaacggctgcacgaattgacaaggatgttgatcgtgatcattcttgtgatcatgactgtatccggagcactcttatttttcatggcaccacagcttttgcagctgtttacgaaggaaagtgatgtcattgcactcggaacggttgtccttcgtatggttgcagtatcagagccactatttggtgtattgattatcctcgagggaattttcaatggggtaggagatacggtaaagccgttttactatgcgctattcagtatgtggtgtgtgagagtgttaggaacattcttctgtgtcaaagtattccatcttggactgtatgcagtgtggggatgcatgatcgctaataatgtctgtctgggaagtttgtttatccttcgatatctgcggggaggctggaatccactgaataaagaaaaaagtagaaaataaaaatagtagtaggaatcgtgataagttcaggaaggcaatgtggtagtgaggcgatcatatgaagaaaattgtaataatcccagattcttttaagggaacgatcagcagccaggaggcaggaagaattattgaggaagaggcaaaaaagagatggccggatgtggaaacagttcggatggaaatagcggacggaggggagggaagcgtggatgctttcctctctgttttagatggggagaaaaaacaagtcaaggtgaggggaccttatggcgagcaggtggaaagtttttatgggaaaataaaagaaacagcagtcattgaaatggcagcagcggcaggacttcctcttgcaggcgagtgcttaaatgccggggaagctacaacttatggggtcggagagttgattttagatgcgcttcagggaggagtgaagaaaatcatattaggacttgggggaagtgctacaaacgaagggggtgctggtgcgcttgcggcattgggagttaaatttttgaatgaaagaggagaagaatttattccggttgggaatactttacattgtattaaaaaaattgatttgtcagagcttgaccaacgaataaaggaaacggaaattttggttatgtgtgatgtcagtaccgttttgtgcggagcaaacggagcaactgcaatatttggaccacagaagggggtagaaccggaggacgtttccagattagattacggattgagacattttgcagagaaaatatatgaggtgaccggaaaggaaattttgcaattagaaggaggcggagctgccgggggaatgggagctggcattgcagcgattcttgggggaaagctgatgagtggaattgatattatgctggatacgatcgcatttgaggaggttttgaaagatacatccatggtaattactggggagggaaagattgatggacagagttcctatggaaaagtaatttcaggggtagcgaaacgggcaaagaaatatcaggttccggtgatcgcacttgcgggggcagtcacagaagatgcagatctgttgtatgagatgggagtcagtgcaatgtttgggattaatagaagagcattgtcatttgaggaactaaaagcgacaacgaaaatggatttgagaaagacagcagaatcgatcttccgtttgatggatctgtcctcaaaagtttagttttttttcacttgacgatgaatgaaatttgacagataatagagttcgatttagagagaggaacatagcaggacaaaacaggcgcacttgcggctgtcggaagaggaaagaagaaaaaatatattgaaatagaataaaagaagaggagaatttatgaagagtttttatacaaatggaacgattttgaccatggaagatgacgcactgtatgcagaggcagtgtgtgtggagaatgggcggatcaaggcggtcggaacagccggggacgtgttgaagtttcgggaggatgcagatgagatgattgatctgaacggtgcggtgctgatgccgggatttattgatgcacattctcattttgtcggtgcagccaatgcgatgacacagtgtgatctgtctctttgtaaggatttcggagagatcatagaattgatgaaagcgtttaaagagaagagaaatctgccgggggatgcatggatcatcggatgtaattatgaccagaactttcttgcagaaggaagacatccggataagacggtgttagatcagatcagcagtgagaatccagttctcttaatccatgcatcttctcatatgggtgtgacaaacagccgtggactggaggttcaggggattacggaagcgacagaggactgtccgggtggacgttacggaagagtcgcagaaacgagagaaccagatggttacatggaagagaaggcatttctggcattccaggaaaagcttccgatgacatcgatggaggagttgatgcgactgatcggggaagtgcagaagatgtatgcaagctacggggtaacaacggtacaggatggaatggttgcaaagccgttgtttcagctgttaaagtatgcatcgggtgcaggacttctgaagctggatgtcgttggctatgctgatgtaatgactgcagcagatttgccggagacggagccggaatatgcgggacggtataaagatcattttaaaatgggcggctttaaagtgttccttgatggttctccgcagggaagaactgcgtggatgacaacaccttacgagggagacgacacatactgtgggtatccgatccacagcgatgagaaattaagagagtatattgcagtcgctttggataaaaagcagcagcttctcgcacattgtaacggggatgcggcggcagaacaatatatctcgcagtttgagaaagaattagaagcaagaggagagaaagacagcaaccgtgcagtgatggtacatgcgcagcttgtcagaaaagatcagctgggacgaatgaaagcaatcgggatgattccgagtttttttgtggcgcatacttactactggggggatatccatatcaaaaattttggagcgcagaggggaagccagatttcaccggtaaaagatgcgcttgaggatggaatgaagtttacatttcatcaggatacaccggtagttccgccagatatgatgcggacagtttcctgtgcagtgaaccgtgtgtcaagaaccggtcaggtgattggggaaaatcagagaatcccggtgcttgatgcgctcaaagcgatcacaagttatgcggcataccagtatcacgaggagcaggaaaaaggaacaatcgctgttggaaaatatgcggactttgtcgtgcttgataagaatcctctggagacagatgtgaaagcactcgcggatatccaggtgcttatgacattgaaagaaaatgaagtagtttatcgcagagaagaagtgcaaaaagagaacgtaagagaaggagaggcaagtcatgaataagcgcagcaaagggattgcactggcagtgatcactgcagttatgtgggggattatggggattttcgtgagagatctctcgaaataccagttttccaatattgagatttctttcttccgatgtgctctggcgggggcggcgtattttgtattccttctgatcacaaagccggcagcgcttaaaatcaatctgaaagggattattatttgcatcgtgtatggggcagtcgcctacagtatcagctttgtcagctatagtgtggcagtatcgagaattccggttggagttgcgacagtactgatgtttatgagtccaatctgggttgcaatccttggaaggtttatgtttggggaaaaactcgagaaaagtaagattattacgatctttgtctgtctgattggcgctatactcgtggcaaatctgatcggaggaggaaatatcaaactggatgcgatcggtattcttgcgggagtggtcaatggaatcggtgtcgcgttgcagatcttgcttccaaagtttttcgcgaaagattatgaccgagatacactgcttgtctacggatttcttggagcggcagtggctctgttgtttggaatggattttggtgcagttgcagaacattttgcggcggctccggtgaccaatcttttgtgggatttatttgggattggaattttctgtacaatggtggcgaatgtggcatgtgtgaaatctactcagtatgtagaggcgacaacgacgagtattctatctgcactggaagttgttgtagggacattggttggattccttgtgttccatgagcacctgactattttgcagatgatcggggcggtcattatcgttgtaggtgcgattggatccgagctggttcaggggaaaaagaagacggaatttaaaaagtagagtgaaataaaaataaagtggacagcttgcaaaatctgatgaaatcttataaaatgcagaggtaattttgcagaaagatttagaaaggggatatttatgccagacatcagaagtacatgcagctgtccgttaatctttacacatcgtatactgggaggaaaatggaagatgagaattttatggcatatcatacacggagaaaatcgtttttccgaattaaaaaaagcactttccggcatttcagagaaggtactttatacaagtttaagagaactggaagaggcagagatactggtcagagaagttgaacaggaacagaagccgtccattatccgctactatctggcggaagaatacgcggaggtgaaagaaatggtccgtgctgctcacagctttgccgaaaaatatgtcagaaagaatgagatcagacagtgtggggacttacaaaaaagtaaggtattgcaggaaaaagaaaaactgtgtatagttgacacggaataagaaatgaatatatttttttacccatgagttagtgtaaactaatatatgtaaaataaaactaatcggaggtggtgttattaaaaaatatatatcaacgatcattctggcagtggcgcttgtgatcttatcgatcgtatcactttttatcggtgtgatcgacacagatctcggagcgcttttgacaggaaatccggagactgtgaaattgtttctgatctcgagagtgccgagactgcttgcaattttatgtactggaatcggtctgagtacggcgggactgattatgcagcagctctgcatgaatagatttgtctctccatccacaggagccacaatttcatctgcccagcttgggatactgctggcgcttgtatttctgccgaattcctcactgtggggcagagcggcttttgcatttgtggcagcgatactcggaacatggatttttgtatggtttatccagcacattcagttcaaagatgtggtactcgttccgcttgtaggaattatgtttggaaatgtgatcggaggcattacaaatttcatcgcatataagtatgagatgacacaggcgctttctacatggcttgtgggacacttctcaatggtactcagaggcagatatgagatcgtatatatggcggtgccgctggtgattcttgctttcgtgtttgccaatcacttcaatattgtgggaatgggaaaggacttttcaaaaaacctcggtgttccgtataattttattctgtttatgggaattacgatcgctgcgatgatcacagcctctgtgattgttgtagttggttctgtttcctatattggactgatcgtaccgaacattgttgcgatgttcaaaggagacaagatccgcggtactttgatcgatacggctcttttcggagcgttattcgtgctggtgtgcgatatgatcgggagagttgtgattatgccgtacgagttgccgattgagctgatcatcggaacagtaggaagtgttctgttcgtgatcctgctattgtatcgtctgaagaacggaagaaaagcagtccggtttgggaaaggagggattggcaatgggcagtgcggcgcatagaaaaaacagacggaagctggcattgctggtatttcttgtggttgtggctgccgctgcatacctgtttaccgacgtgtcatttgcaaatgagcggctcttccgctatgcgatgaagataaggattccgaagctgatcgcaatgcttgtcacggcggctgcgatcggaggggcctccattgtattccagtctgtgatcaacaatacgattgtaacgccttgtcttctgggaatgaactctctgtatacactgatccacaccgcggtcgtgtttgtggcgggatcgggaagtttccttgtagtgaacgggaacatttcttttgcggtggaccttgttttgatgggagtggcggcgacagtcatttacagttatctgttccgtaagacgaatcataacattttgtatgtgcttttaatagggacggtactgacatcgttttttgggagtattcagagtacgcttgtcagagtgatggatccgaacgaatatgacagtctgcttgcgtcgcttgtggcaagctttagcaatatcaattcggaaattattgtgtttgcggtactgctgctgacagttctgatatttgcactacgaagagaacttgcgcttctggatgttctgacactcggaagagatcaggcggtcaatctcggggtggactatgaccgggcgattcgaagacttttacttggagtggcactctgtattgcgattgccacagcgatggtaggtccgatctcatttctgggactgatcattgcgaacctgtccagacagcttttgaagacgtaccgccattcacagctgatcgcgggatcagcactgtttgggatgattgttctggcaggaggccagatgatcgtagagcaggtgttcgtctacgcagttccggttagtgtatttattacagtagggggcgggatttatttcctgtatcttctgcttggaaaaaggagggttaatttttgagaatccatgagttgaaaaaacagtatgatgggaagaccgttgtggattccgtttcctttgagatacagaaagggaaagtgactgccctgattggcccgaatggtgccggaaaatccacggttatgagtatgatctcacgtctgatcgcaaaagatgaggggcttgtggaagtagaaggaaaaagcattgaaaaatggaagagcaaggagttatccaaacatctggcgatcctgactcagagcaaccatatccagatgaaactcactgtcagagaactggtggcatttgggcggtttcctcacacaggaggaaggcttacagaggaagatgaaaagatcatagaccaggcagttgcctatatggaactgaaggagtttgaagaccgtttcatcgacgagttgtcaggaggacagagacagagggcatacattgccatggtaattgcgcaggataccgaatatgtgcttctcgatgagccgacgaacaatctggatatttaccatgcgaccaacctgatgaaaatggtgaggaaattaagtgatgatctcggaaagactgtgatacttgtactgcatgagattaactatgcatctttttactcggattatatctgtgcgtttaaggatggaaaaattgcaaaatacggagcagtcgaggaagttgtgacaaaagaggtgctctcagagatttaccaggtagattttgaaatattgaggatcgaagggaaaccactgtgcatctattattaaggcaaagagaattacggtaaaagaaacagaaaataaaaagaaagcaaaagaaggaaggaaaaggagaaaacgatgagaaaattaacaggagtattacttgcgggagcaatggcggtcagcctggcagcatgcggacaggcggaggagaaaagcaatacctccaaaaaggcggagacagaacagacaaaggagcagacaccggagaatgtgatgatcaaatcctttaatggaaacaaggaagaggtgaatctggaagttccgtacaatccggagagaatcgcggtgcttgatatggcatcacttgacattctcgataatctgggaatgggagaccgtgttgtaggttccgcttctacctctctggaatatcttactgattatgtggataatgaagaggtagcaaatctgggaacgatcaaagaagcggatcttgaggctgttatggagtgtgacccggatgtgattttcatcggaggacgtctggcatcttcttatgacgcgctcagtgaaatcgcaccggtcgtattcctctccacagaaagtgagctcggcattgtaaagagtgtgacaaaaaacgcggagaccatcgcatctatgttcggtctggaagatgaagtatcgaaaaagacagaagggtttgacgaacgtattaaggcactgaagaaaacagcagaaggcaaaacagcgttagttggtatgacgacaagcggaagtttcaacttgatggggaatgatggacgctgctcgattgttggaagagaggttggatttgaaaatcttactgcggcagagagcacatcgacacatggaaatgaagcatcttttgagacggtagtggagaagaatccagactatatttttgttatggacagagatagtgcgattggtgcagacggggcacagaccgcgaaagaaattgtggagaatgaacttgtcatgggaacagatgcatataagaatggacggattatctatttggaacatccagcagtgtggtatacagcagaaggggggatcacagcacttaacattatgctttctgacctggagaatgcactgtaagagaacaaaagcattgtaaaatactgttgcagagtgataaaattatagagaaggaaaaggtattttccggctacagaacatgtaccggaggatgccttttttgaagttacatttttacagagcattgcatctgtttttaaagcgactggatcgatgtatttgtgcagggaacctggtgggaatctgatagaaagacagaggagacatgtccggcaaccgtaatctggagacaataccttgacaagtatatactttatctcgtatgcttttagaaagccctttcacggggaaatgtaataaggagaggaaatggaatcaagaaacatgaacatttatgatatagcaaaagaagcaggagtctcaatctctacggtgtcgagagtgctcaatcataagggcaacgtaaatcctgcgacgagagagcgagtagaggaggtacttgaacgcaatcactatacaccaagtgccattgcacgaggcatggtcagtaagtctatgcgtacggttgcagtgcttacggtggatattcgtgtgccgcactatgctcggacggcatacacgattgagcgggaattaagtcacagaggatatgaagttactctctgcaatacaggtggagaggcagaggagacagagaaatatctgcagacgatgttggagaaaaaggtagatggaatcgttctagtcggatctgtgtttaatacgatctgtaagaaaccagaaattaaaaagcttctgcggacggttccggttgttttggcaaatggaaagctggaaatggctaattcctattcggttctcgtagacgataagtatggaattgcacttgcggtaaatgaattgctcaaaaaaggacatagagatatctattatgtaaaggatatggataccgtcagtgcccggctcaaatgggaaggatttgtcgatacactgcagcatgccggaattgctgaggcaaagaagaaggtattacatacaacatctgatctggaaggcggaatgcgggcagtcagagagctgatccaaagcggaaagaaattctcagcattggtctgtggagaagatattacagcggcaggtgcagtgaaagcacttttgcaggaaggttaccggattccggaagacgtggctgtgacagggtacaataattcagaatatgcaaggatctgtgagccgacacttacaacgatcgacaataaaccggaacttgtagcgatgttcagtgtgcagcttttgacaagtctgatcgagaagacagatgcatattcttcctgcacaatccagccggaacttgtagcgggaaagacagtctgagttcttcagaccttataggctgaagaactctttgatctgttctgcaataatgtttattaattttgtcctcgcttcgatacttgcccatgcgatatgaggtgtaataagaaggcggttactgtcagaaaagccgcggagcggattgtctgtgcacatgggctcttcagacaggacgtctagaccggcagctcgtatttcgtctgtttccagtgcccgtttcaaatctttctccacgacgatcggaccgcgaccaagatttaagaaaatagcgcttttcttcatttttcgaaatgccgaaaaatcgatgagattttccgtatacttatttaacggtgcatgtacggatacaatgtcggcagtctcaaggagcagatcaagggaaacttgatgaaaaccttcttgaggagccgcgcctgaaggtgaagagtaaatcacgtttgctccgaatgcgtttgcaatggaggcaactcttcgaccgatatttccaagaccaatgattccccatgtcttgcctttcagttcataaaaggtcttctcaaaatgtgtgaagatcgtatcatttgtataatggtcatttttgacataatcgtcataatatctcaaatgttccagaagataaaacagcatggcaaaggtgtgctgtgcaaccgattccgtagagtatccggcaacattccgccatgcaatgccacgtttgtctaaatactctttatcaagattgttcgtgccggtagctgttacacagactaatttaagattttttgcagttccaatcgaagcctcgttgatcaggatcttatttacaataatcacatcggcatccaaaacgcgcccgggaacttcctccggagtagaaaaagagtatttgacaacctctccgaactggtcaaactgggagaggtcaagatcatcgccgattgtcttcgcatctaaaaatacaagtttcatatagtagtctcctttctgttcgctgcatggcaggttgttgcctgtagacagtttctgtgacagcgatagtttataaaagtttaccatgaatgtactagttatgtaaattctttgttttcgaatctctttgagaatgccattggtgcgataaattcctgatgtagaacaagatattgtgaaagccctttctcaaaaatgatttaaaaacctttccggaacataataaatgttaaaaataaatcgttattttgcactaaaataaatacaaaaaatagacgaaatgacgaaaatagttgtttttcataacatatattgacaaaatatgatagataactataatgaaaaataaagaaagcgcttttacaaagtttcaaaaaataattagtttgttttgaaattgacaattgtaaaaggcaaaatgtttcagaaagttgaaaggagatcacataatgagagttcaatatgatgtgatggtgcaggaatttgcacgtgtattagagaaaaaaggatttcggagagaggatgcagagagtgcagcagtgatttttgcacagaacagtctggctggtgtgttttctcacggactcaatcgctttccgcgtgtcgtaagttatctggaaaaaggagagatcgatccagatgcgcgcgcaacatgcgagatgagtatgggtgcaattgagcgatgggatggacatcgtgggtttggtccgctgaatgcaaagcgtgcaatggaccgagcatgtgaacttgcaaaagaatatggaatcggatgtgttgctcttggaaataacaatcactggatgagaggcggcacttatggatggctggcagcggagaacggatgcatcggaatctgctggtctaacacaatgccgaatatgcctgcatggggtggagcagacagaaagatcggaaataatccgctgatcatggcagttcctcgctcgaatggagaacatgcaatggtagactgtgccgtgtcacagttctcttacggaaagattgaagactgtcgtctgcgcggtgtgcagcttccggttccgggtggatatgacacaaagggagaactcacaacagatccggcagagattgagaaaacatggcgcgtacttccgatgggatattggaagggaagtggactttctattatgttagatttgattgcgacggttctgacaaatggaaattcagtacagaaaatcggaacattcggagacgaagtcgggctgacacagattatgatcgcagttgatccgacaaaattccagacagcagaagagacagataagattgtggatgagattcttgcagatatcaaatcttcggagccggttaccgaaggcggagaagtcttctatccgggcgaactggaattgaacagcattcgtgacaacaaagaacatggaatcccagttattgaggaagtatgggaatctgttctgaaaatgtaaagtgacagatactaggaggaaaagttatggaatatatcattggtattttgctactcatctcatttgtcggactggcagtctacgcggttcgcggcggaaatttgatgatgggtatgctcattatgggagtcatctggacagttctcccactcattggaaatacatttgcaacaaatcctgattttatagcggcttacccgggagtgacggatatttctttcgtagatgcaatcacgaaagtcttccagtcaggaccagaaggatggggaagcgtacttgtaaatgttgtgttcggcgcatggtttggacgtgtgctgttagagactggaattgcggatgcattgattcgaaaagccgtagagcttggcggagataaaccgatcgttatatgtgtgcttctgtcaacagtgacaacagctattttctctacattattcggagcaggtgcagtagttgcaatcggtgtgatcattcttccgatccttatgagtcttggaattccgaaaacactttccatcggttcgttcatgatgagtgtcggtgcaggaatgtatttaaacccggtgctttctggtcagttcctcgcattcttcctcggggaggatggaaaacaactgatcacatacgatgatcctgcacgcttaagatgggcggtgatcggccttgcagtacagcttgttctagtaatcacaatgtgtgcatttacactgagaaagaaaaagacagtacatgcgtggagtgcttcggcggcgagaaaagcccgtccgggatatgtgccgacaccggctctgatcgctccgattcttccggtgcttctgcttgttattctcaatgtgccgatcattcttggatttattataggaagtttctacgcactgatcatctgtggaagattaaagacattccgcggggcatgccgtgtgctgaataaagatttctatgacggtgtagtagacactgctccgcttgtaggatttcttctgatgattccgatgttcaacaaagcagcagaactttgtgttccgtatttcaatgcactgcttggaaatgttattccgaacaacacactaatcatcagcatcgcatttgcagtactggcaccgcttggattgttccgtggaccgtttaccttatttggatgtggggcagctacgctcggaattttaaaaggaatcggattttccactccatatctgtatgcactgatggtcattccttcgatcacgatgaatgtatcaatctgtatgacacagagctggatcgcatggggtgtaagctatgcaaaagtttctacaagagaacatttgaagaagacattgccggttgcatggatcatctgcgcaattatgcaggcaatcacatatatcatgtttggttaaggagagggtgaaaatgagtaatagaaaagtacgcatgggaatagatgtcggcggaacccatacaaaggcagttgcgatcgacaatgcaacacatcagatcatcggaaaatcttccgtgaaaacatcgcacgatgacaaagcaggtgtggcagccggtgttgttcaggcatttcaaaattgtctgaaagaaaaccagatcgatccgaaagatgttatcttcgttgcccactctacgacgcaggcaaccaatgcgttgatcgagggtgatgtggcgcatgtaggtgtagtcggagtcggaccgaaaggggtaggaggatggcttgcaaaagcacagacaaatatgaaagacatcaatctagggtccggaagatttatccatctgcacaatcgcttcatttgtgatgagaaactgtctgaccagcttgtgacagatacgatcaaatctctcgtaggagaaggggcgcaggtaattgtttccagtgaatcttacggtgtagacgatatggaaaatgagacagggatctgtgcgattgcgaaaaatatggggctcgaagcgacggcggcaagtgagatcacaaagctttacggacttacacgccgtacacggacagctgcgatcaatgcttctatcctgccgaaaatgctgaacactgctaattctacagagcagagtgtcagaagcgcaggtgtggaagtgcctcttatgatcatgagaggtgacggcggtgttatggagatcagcgagatgaagaaacgtccggtactgacgatgctttccggaccggcagcctctgtgatggggagtctgatgtatctgcgcgcttctaacggtgtatattttgaagtaggtggtacgacaacgaatatcggtgtcatcaaagacggacgtcctgccatcgattattccgttgtaggaggacacagaacttatatcagcagtctggatgtgcgcgtgctcggtgtagcaggtggaagtatggtgcgtgcggatagaggcggtatcaaagatgtagggccacgttcggcgcatatcgcagggatggattatgctgtatttactccggaagaagaaatcgtagatccgaaagttgtcttcttcagcccaaaggaaggagatccggatgactatgtggcaatcgaattgaagagcgggaaacggatcacaatcacaaatacttgtgcggcaaatgtccttggattgatcaagccggaatatttcgcatatggaaatgccaatgcagcaagaaaagcaatgcagccgcttgcggattacatgggaaaaacagtggaagaagtcgcaacacagatcctgacaagagcttacgaaaagattcagccgatcatcatggatctggcagaaaaatatcgtttggaaaaagatcagatcagtcttgtcggagtcggcggaggtgccgcatctctgatcgggttctgttcagataaaatgggacttcgttactcgattccggaaaatgcggaagtaatttcttctattggcgttgcgctcgcgatggtgcgtgatgttgtagagcgtgttgtgccaaatccgacaccggaagatatccgctccatcaaggcggaagcaatcgacaaggcggtagaaagcggtgcggcagccgacagtgtggatgtccacattgaaattgatccgcagacatcgaaactgactgcaatcgcacttggatctacagaagtgaagacaacagacttattgaaagagtgtacgccaaaggaagcatgcgagcttgcggcagaagatttaaaagcatccaaatcagaagtcaaagaagaatgtgcgacaaagaacttctatgtatttgggatggaacgaaaaggaaaacatccagtccgtatcctcgataaaaaaggatttatcaaagtgcagagaaatgatgcaaaagcagtgttgtgcaaggcaggaagttatcgtaatattgtttctcagctctgggaggaactggccatttatcagcaggatgcaatcttaagaccggattattatatttgcgccggtgcgagagtcatggactttgcaggttctattgacctggataagatcatgatgctgatggaagtagagatgcagatgatcaatccgggagaggatgtgatcatcgtgggagcaaagaacagtttgtaaaagagaaaggggtgccttttatatggaaggaagcagaaaaaaagaaaagtggaatcgtttggtagatgcattttccttaaaaggcacttcttatgtggttccacagtatcctcaggtggaaccggagcagatggcagaggaattgtcagagatatcagaaacagtctggggaatgtatgcctttgcacgggaaccactggaaggaagatttacaagagagcagaaatgccattatatcgcaaaagctaatgcctgcggaagagaatgggcagatcaagttgccaaagagtatgggacaaacgatccgaaacttctggcagaacgtatgggaatgaaagtcttaaagaaaaagacaccgacaggaggcggaatcgtgttgtttgcacagtttgttcagccggatgagattacaatctttacggactgtattgcaaaggcacagcgcatttacagagcgtgtggctgtccgcttctggagtcggaaaaactgacctcggtactgcttgcccacgaactctttcatgcggtggaagagaggcatgaaaaagaaatctatacccgcacggagaaggtagagctgtggcgccgcccgttttccaaccgttcatcgatcgtctgcctgtctgagattgcagcaatggcatttgcggcacagatgacaggaattgaggtatcgccttatatgctcgatgttctgcttgtgtatgcttatgatcaaaatgctgcgtggggattgtatgaggaagtgtgcggcctgcaggcagaagagcgggaattgcaggaaaaaagagaaaacaagaatatttgtctggactgagagccggacagacagggggcaaatcatgctgacaacaacaatgaaatacgctgaaaaatataattatcttgacgagaaatttcagaaggcattctgctttctgagagagacggatcttctggcactgtctgtcggaaacgttccgatcgacggggaagaggtctatgcaaacgtgcagagttatacgacaatgacaccggaagactgtccgtttgaagcacatcgcaagtatttcgatattcaatatgtcgcagagggggaggaagtcttcggttatgagcctttggataatctgactcctgcgatggaatatgacgaagagagagatctgattttctatgaagagcctgatcagagcggctccatcgtcttaaaagcaggagattttgcgatcgtgcctccggaggatggtcatgcaccacggagaatgacaaaaaacggagcatgccaggtgaagaaaattgtagttaaagtaaaagtataagtaatgtcatgaaagaaaaagtcttatgccagttgtggtgtagggctttttttcatgggaatcactatgggattctatgtgacaagaaacatgtgttgcgtgaaaaaaatcagcagactttgtagaaaaatagggaggagtatgataaaatgaaaccatatttttatgaggagggattactatgaaatattgtcagcaatgcggtgcacaattggaagaggaaatgaagttctgtgtatattgcggtgcgagtgcggaagatagtgcgaatgcacagcaggagcagaatccatggaacaactacaacagcagtcatcagtctcaggaaacgtatggccaaaatcggtctggacagaacgggcaaaatatgaactgccagaataatggctttcagaataataatgccgcaggttatggccagatgccgggaccttacggaggaggtattcatgggattgagagaagaagtattccgctaagtgtcattttgacgattgtcacatgtggactttatggattatactggatcatcaaattaaatgatgagatcaatcagcttgccggagagccgaacgcaacttctagcggaatggtaatcttactttctatcgtcacatgtggaatctatgagttttactggctgtataagatgggagagcgcggcgataagatcaaaggagtgaattcaagttccggtatcctttatattgtcattgctattttaggattgagcattgttgacttgtgcctgatccaggatacggtcaataagaaggtgggaaattaggaacggtttaggaaaagagcaagatgaagaaaaaagcagggacaatatggaccgtgctggcagtcggagtgatctatttttgttggctgaaggtgacagggatcgggattccgtgcatatttcgtaagatcacagggtggtattgtccgggatgtgggataaccaccctgattttatgcatttctgagcaggattttgtgggggctttttgggcaaatccatttttgtttgtgacaagtccgtttcttctgggagaacttgctgcagagtggatccgggtaaaaagagggaaaaagatgccaggatggaatgaaaagctgttagttgtgtatacgatttttttgtgtgcatttggaatttggagaaatgtagcatagattcggtgttgtggtggcagagaaagaggattgacggaagcttttgaaaatgttaagatgaagcagtttcaaaaggaggaaaaaaagatgaaagataaaaagaataaaaaaatatggattgcccttgcagtctttgtagttgtgatcgctttacttgcaggagcttacatgatgttccggccgcaggcacaggaaggaagcaagtcggtgacgatcacagttgtaaataaagatggagaaaagaaagagtatcagatcaagacagatgcagaatatcttcagcaggcgatggatgacgcaaaagaagaagggcttacttattcaggggaagacagtgagtatggtcttatggtagatacggtaaacggtgaggaagccgtgtttgagaaagacggtgcctactggggcttttctgtcaacggtgaatactgcaattacgggatttcagagcaaccggtagcggacggagatgcatttgagattgcatatacagtaggagagtagcaatgaaaacaagagagcttgttggaaacgcatttcttgcggcgattctggtcatagtccaggtcgccttttctttcctgccgaatatcgaatttgtatcacttctgatcattctttatacacttgtatttgaaaaacgtacagtagtgatcatctatctatttgcgcttctggagggaatcctctatggcttcggggtgtggtggatcatgtatctgtatgtgtggacgattttatatcttcttgtgcggatattcagaaagaacaacagcctgcttctgtgggcggttctgagtggatttttcggactggcgttcggcatgctgtgtgcggttccgtatgcagtgacaggaggaattggagccggaattgcatggtggatcagcgggattccgtttgacattctgcatggaatcggcaattttatcacagttcttattttttttagaccacttcagtatatcctgcggaaaatcaagtaaaaaaacttgacaaatccgcagggtgcatggtaagctatactggcgaatggaagtaggtcttttttttatgcctaaatttgggtagtctcgcaaactaccatgtaacacagaattcaatttaaaaaaagcgaggtggaagttgtgcgcacaagaatcacattggaatgtacagaatgtaaacaacgtaattacaacatgacaaaggataagaaatctcatccggaacgcatggaaacaaaaaaatactgtaagttctgcaaatcacacacattacacaaagaaacgaaatagtcgttgaaaggaagtgaatgttatgggcgaaaaaactaaggataagaaaaaatccgagaaaaaagctcagaagacaagctggtttcaaggcatgaaatctgagtttaagaaagttatttggccagacaagaaaacacttgcgaaacaaacggcagcagtcgtttcagtgtccgtttttttaggggcattgatttcagttatcgatgttatcgtaaaatacggtattgatttattggtgaaataggaacggatatgtgaactgttagcaataatgaaaggtgattttatgtcagaggcaaaatggtatgtagttcatacctattccgggtatgaaaacaaggtgaaagccaacattgataagacaatcgaaaacagacatctggaggaccagattcttgaagtccgtgttccgatgcaggaagtgatcgagctgaagaacggtgccgagaaagcggttcagaagaagatgttccctggatatgttatgattcacatgattatgaatgatgacacatggtatgtcgtaagaaatacacgaggcgtgacaggatttgtaggaccgggatctaagccggttccgctcacagaagaggaaatgctgccgctcggaatccagagtgaaagcattgtcgttgattttgaggaaggcgatacaatcactgttgttgccggagcatgggaaggaacagtcggagcagttcagacagtaaacccagcaaaacagagtttgacaatcaatgttgaattgtttggtcgtgaaacaccagtcgaattaagtttcacagaagttaaaaagatgtaacaataagatatggtctttggaacggaacaaagactatcacttaacaaatcgagtgggagggaaatccccgcgaataccacaaggaggtactgaaaaatggcaaaaaaagttcaaggttatattaaattacagattccagcaggaaaggcaacaccagcaccaccggttggtccagctcttggtcagcacggtgtaaacatcgttgaatttacaaaacagttcaacgcaagaacagcagatcagggagaccttatcattcctgttgtgatcacagtttacaatgacagaagcttcagcttcgtaacaaagacaccaccggcagcagtattgatcaaaaaagcatgtaacatcaaatctggttcaggtgtaccgaacaagaacaaagttgctacaattactcaggaacagttaagacagatcgctgagacaaaaatgccagacttaaacgctgcaacaatcgaagctgctatgagcatggtagctggaacttgcagaagtatgggtgttaaagtagaagaataagaagattgtaaacagttaatgtgggagggctagctcccgatactaccactaggaggttatttaatatgaaaagaggaaaaaaatatattgaggctgctaagttgatcgagagaggaaatctctacgacaaagaagaagcagtagcattagtgaaaaaatctgcagtagcaaaattcgatgagacaatcgaagcacacatcagaactggatgtgacggacgtcacgctgaccagcagatccgtggtgcggttgtattaccacacggaacaggtaaaaaagttcgtatcttagtatttgcaaaagacgcaaaagcagaagaagcaaaagcagctggagcagattacgttggagcagaggatttaatcccaagaatccagaacgaaggatggtttgattttgatgttgtagttgctacaccagacatgatgggtgttgtaggacgtttaggacgtgtacttggaccaaaaggtttaatgccaaacccgaaggctggtacagtaacaatggacgttacaaaagcaatcgcagatatcaaagccggtaaaatcgagtacagattagataaaacaaacattatccatgtgccattaggaaaagcttctttcacagaagaacagttagcggacaacttccagacgcttattgatgcaatcaacaaagcaaaaccagcagcagttaagggacagtacttaaagagcgtgactcttacttctacaatgggacctggtgtaaaagtaaacccagcaaaattagcttaatttgttattgacatcaaatatataaagatgctataatagcagagcaataactgccgaagacagtaggtgccgtaaggcataaggagaaaacgcctaccgaggagatgtaaattctaaatatgaattttctagcctctctgtcttttgacagagaggtttttatatcggcggtataaatctataaggaggtataccattcatggcaaaagttgagttaaaacaaccgatcgtacaggctatcgcggaagacatccagggtgctcagtcagcagttttagttgattatcgtggattaacagtagcagaagatactgagttacgtaaacagttaagagaagctggtgtaatctacaaagtctgcaagaacacaatgatgagaagagcattcgagggaacagagttcgctgaacttgattcttacttagaaggaccaagcgcgatcgcaatttctaaagacgatgcaacagctccggcaagaattctttgcaaatttgcaaaagacgcaaaagcattagaattaaaagctggtgtagtagaaggaactgtttatgacagcgcagctttaaacgagttagcgaagattccttcaagagacgaattactttccaaattccttggaagcattcagtcaccaattacaaactttgctcgtgttattaaacaaatcgctgaaaaagatggcgaagttgtagaagcggcagcagaggaagcagctgaagtaacagctgaataatctataaaaatcaaaaaacgaaaataaagcaaattttatggaggtaagtaaaatggcaaaattaacaacagctgaaatgatcgaagcgatcaaagaattatcagtattagaattaaacgaattagtaaaagcatgtgaagaagaatttggtgtatctgcagcagcaggtgttgtagttgcagcagcagctggagacggagctggagcagcagaagagaaagatgagttcgacgtagaattagtttctgctggagcatctaaagttaaagtaatcaaagttgttcgtgaaatcacaggacttggattaaaagaagctaaagaagtagtagacggagctcctaaggtagttaaagaaggcgtttctaaagcagaagctgaagaaatgaaagctaaattagaagcagaaggtgctgaagttaacttaaaataattgtattgtgaaaacactacaataaaataagatgaggctgtcatccttgcagaaaatgcaggatggcagcctcatttgcatatggggaaaagtgctttaaactttaaaaaagtatcttgttgagtcataaaatgaggtgtcaaactataaatagtcaagacctttttaataaaaatattaaatggtaaaaaaaggtaactttaatagaccatctgagtacatcgtatttcagatggaacagacaaatatatgtagagcagattttagcgaagtttctgagtgttaaagtctatatcttgcctctccaatgcatagatgactctgatcagtttctttgctacatgtgtaatggctactcgatgttttttgccttctgcacgtttctttgcgtaataggttgcaaaggtcaaatcaaaacgaattagaggaaggcaagcattaagaagtacgtatcggagctgtgatgaaccatgtttcaccattctgccgccgtgagattctgttccagaatcatttattccgggctcaattccggcaaatgcaagcatctgaccgggattagaaaagttagaaatatcaccatattcagcataaataacagcggctgaaattggaccgattcctggaatggtcagataatgaggatgtacttcttcaataagtttatgaatctcagattccaaagtatcgatttctttgaccagcgatttgtagagggttaataaactgatcaattcaatgtcaaagatagaattgttgacaccaactgtattggcagcaagctcctttaagcggagaaactgctgaatagaaaactttcctctggaaatgcaacgtaacttgtcataagaagcagaattcatgcgtgccattttttcagcagaaccatagttttcaagtagatacaaagccgttttggaaagtctttcattaaaaaaaggcttaaattctgggaaagtatggtctaagacattggtgatttttacaagataaaaagaacgttgacgaattaatcgatctcgtaaacgagttagtgactttaaagaataagagtggtaaaatccttttgaatggggtttgtactcaacagtcattaaccagcgagctatcgattcgcagtcaacagagtcggttttggttcgccttaaggtcgtagactttttgtattccttgataagaactggattaacttccatgaagctgtggtgggcattttcaaggaagagttcgagattgagggcataatgggctgttgattcaaaccctatttttatatcctcaggattggagagagaatttaaaacagtaagtagttcttcaaaacctgctttatcatttttaaaagtgaattttgaaactactttttgatcagctgcagatataatgcagcaatcgtgcttgtacttggaaatatcaattccaacaaagtacatggacatagaaatatacctcctgaattagtatttaggcactgaagtcttccacagagaattcgactgtgtaaacacgtaaatagaaacgtcaagcgttaacaaactaattaccagtaatagacgaaaagctgtggtctgagacacctccgaacagtcaaagctgtaaaaaaatagagacagatccacagtgccttttcaaactatatcagagatggacttaaatacccagagttaatctggagaaaggaaaaatccaattaccatctaagataattggattatacgtgctataatgagaaaagatcaggcgaaaacagatgaaagatgctgaaagagaggtgggaaacgatatgtttacacaaaaatttatgcaggagatagagcgtagctttgaagcgcagctgaaccgtcttggagagagaagaacagaggtggaggctgcccttgtcaaatgcagtaacgatgaggcggaggcgctgaaatgtctttatgcttcgatgccggtcagcgatgcggcagattatgaggcggaattgtttttatcttatgcaaaacatggagtgtttttatgggaggcaggtccatttgcaggaacgattccggaggagatttttgcgggctacatactccaccatcgagtaaataatgaagatctgacaccgtgtcggccgtttttctatgaaaagttgcataagaggattgaggggctttcgatggcgaaggcgattttggagatcaattactggtgtgccgaggaggcgacgtatcgcacgacagatgacagaactgcaagtgcagagtgcgtataccgttccgcatatggcagatgtggggaggagtccacctttgcagtatccgtgttccgaagtgtcgggattccggcaaggcaggtgtatgttccactttggtcacactgtgatgataatcatgcgtgggtggaagtctggagcgatggaacgtggaagtttctgggagcatgtgagccggaggaagttctgaataaggggtggttcacgaatgcatcctcccgggcaatgatggtacattcccgctggctgcttccggtcagaccgaaggaagagcaggtcggacgaacaggtatggctcttgtggctaatcagctgaaaacgtatgcaaaaacgaccactgtggaagtgacggtgctcaatgttgacagtactccggcttcgggagcagagatccgctttggggtgttgaactatgcagagtttggagaaattgcctgtgcccatgcagatgcaaagggaaagaaggtgctggagactggatttggcactttgcaggtgactgcatacaaggatggagcctatgcggaacaactcgtagatgtggcagagcggcacagctgtatactgagactggggcagacagcatgtcagccagatgtatggacggagatgatcgtaatcgctccgaaagattctccggtcaatcgttgcgtgcagtcggaagaagaaattttgtttggaagagaaaaaagcagaaaagcgacaaaaaaacgcatggcaaaggaagcggctttttatgatgaagatgtggcggtaaaggcagcagaatgtatgccggagcggtttcgggcgcgtgcagtggagattatgaagcttgcgtgtggaaatcagagagagattgcaaaatttcttgaaaaggagatggaacctgcactcaagatggagctgttaaatagtcttcgggagaaagattatctggatattaccgcagatagtttagaagaacattgcaggcaggcggcagtctttgcaggaaaatgggacaaagagttatttgtaccgtatatcttatgtccgcgcgtggataatgagatgattcgtccattccgaaggtttctgctgtcatggctctcggagaaagagaggcagaagatggcggaggagccaaagtatgtgtgggaatttgtctgtgcacatctgaagtcagatgagcagttagagtatggaaatctgatcacttctgcacagggcgcatttaccaccggatatggaagtgcactgaccaaacgggtagtaagtgtgcagatattaagaacacttggaatccctgcccgtctgaatccttctgaccagatactggaagtgtggaaggacggtgcatttgtggcattggaagagtatgaaggacagtcggaagtgcggacagcagggattgttgtcgagcagcaggaaggaaagacatggacatactatcaaaactggacgatcgcgaaatttgatggaacgaaataccagacattgcggctgagtgatgagagcgggcttccagtctatggggagatccctttgttcccgggacagtataagattctcacagcgaaccgtctgccaaatggaaatgtgtttgccaaacagtttgtgtttgtattgaaagaaggggaaaaacggcatattgttctcgaacagaaggaggcagatgtcaaagacatgctggaagagaatgcaatcacagactttacggtgcagaaagaagacggaacgcaatgtcatctttcggaactggtaaaagaaaaggaagggctcttcctctggttggaggaaggaaaagagccgaccgaacatcttttaaatgagatccgacagaggagtgaggcatataatcaactgcttgcgaatctgtattttgtagtccgggatatggaagtgaaaaaggatccgacgcttgcgaaaacactcgcagaactggagcatgcccagtttcttgtagacgactttggagtagatatggagacgctggcaagaaggatgtatctggagccgggcaaactgccgctgattgtcattgtcaatcaggaaatgagaggaatctatggtgttgcagggtataatgtgggaagcgcagatatgattctgaaaattttaaatagataaaggtgagaggatagatagaaaaaggaaatgtgatgggtggatttccatatgtgggaagtttaatcgattgaaaaaagcaggagttgtcttaaaggcaattcctgctttttcacaacagaagatttttattctcggacaagcgaatcacggttcggttgaggtttgcgctccacaagttttttgccggaagagaatgcaatcaataagccaagtcccatgagtaaaagagcaaagaataattgtaatccatctgttaagaaggcaaatcctccggttacgaatatttttttgcagatggagtaaacgctcattcctaaggatgtcatggtcacaactaacatcattgtcattggtgcgtataacatgaatccctttctgcctgtcacttttaagaacacagataaagaaatcaataccatagcggctaataactgatttgcagaaccaaacagtggccagatgttattatatccacctaagcttaacagatatccgccggccagtgtgatgattgttgcaaagtatttgtttgtcagaacttttacagccggtgaaactgctttgccttcttcgatttcaaataattcctgaaaagagagtcttccgatacgtgcaacagcatctaaggaagttaaagccaaagcagaaacgaacatagtcatgatgcataatccccattcttgaggcattccaagcttactgatcaatcccgttacccctacggagaatttcgtaaaaggagtagcggtgtctgccaatgccatagcggccagatcattatttaatacaccggtgtcggctaaatttgtcaaagagcctacaattacaattactaatacagctaacagagattccagaagcatactgccgtagcccacttgcagcatgtctttttcatttcgaatctgtttgctgctcgtctcgcttgatactaaagaatggaatccgcttactgcaccgcaggcaatggtgacaaacagtgtcggaaataaataacttccattcgcagagacaaaaccggtgaagactggtgttgaaatcgtaggatttgaaatcacaactccgatgacagctgcaatgatcattcctacaaataagaaggtagtcaaatagtcacgcggttgttttaagagccacataggggtgacacttgcgaagaaaatataaacaaacactaaatataaccagctttgcttttgcagataaacaggaaaagcaattcctgctgcaagcatagcgacaattagtacgattcctaaaacagcttgtttccagccgtcgattttcgttttgcgtaagaataatccaaatgcaatcgccacaaaaacataaagaatagaaatggaagcagccgcagcatttggttgtaatttggagccgtcagcgcgaaaaccatgaaaagttcccgcaaccatatctgcgaaagccgcaatgaccaataatgtaaataaccagcagaataagaaaaataactttcttccggtctttccaatatatatttcaataagctggccgattgatttcccatctgattttacagaagtataaagggaagcaaaatcctgaacggctccaaagaaaatacctccgactatgatccataaaaatgcaggaagccagccaaacatcattgccatcacaggaccggtgacaggacccgcgccggcaatagaagaaaattggtgggcaaagacctcccatttattgctcgggacatagtcaaccccatcctctttttttactgcgggtgttttagcagttacatcaattccccactcttttactaagtagcggccatacagcagataagctccgattaatacaacagccgtaattcctaataataataatccattcatacagttcctcctttgcatattcctttttgataacagcatgaaataaaaataaaaaacttcgtctagcctcacagaggagaaaacgaagacgaaatcacagatttgttttgtagtactacttagattgcataaaaatacagtgtaacttttggcctatttcttgctttatcccagtgctgaaagcttttgtgaagaaaaagcaggaaaaaagttatcttgatattgtatttgtattcatgcgttgcgtatatattacaagaaaaaaatactagatgtcaattatttttttgaataaaattaaattgaactacatattgagaaaatacaaagaaatgtcaaacggttattgacaaaaaagaggaaaaaggtgtaatctgataactaaataattttaggaggagttacaatggaagtaaaatttatacccgcagaacaattaaaagaaaagccggatgagaatgcgttaggctttggaaaatattttacagactatatgtttacgatggactggacgaaagaaaaaggctggcataatgcaacgattgagccttatggaccagtttcactggatccggcaacaatggttttacattatgcgcaggaaacctttgagggattaaaagcatataggacaaaagaaggaaagctacttttattcagaccagaaatgaatgcgaaaaggtttgcaaattccaaccgccgtctttgtatggaagtattgccggaagaactgtttgtggatgcgattgctactttagtctcttatgaaaaagactggatcccaacggcggaaggaacttctctttacattcgcccgtttatgtttgcaacggaacgtgcggtgggagtacacccaagcaatgcatataaatttatgatcattctctcgccggttggggcatattacccggagggagtgaatccggttaaaatttatgtagaagatgaatacgtgcgtgctacgaaaggcggtacaggatttgcaaagtgtggtggaaactatgctgcaagtatagcggctcaggtgaaagcggaaaagttagggtatacgcaagtattgtggcttgatggagtagaaagaaaatatgtagaagaagtagggacgatgaatgcgatgtttatcatcgatgaaaaaattgtgactgcaccgtgtgatggaacggttttaccaggagtcactcgtgattctgtgatccaattgttaaaatcctggggatatgtcgtagaagagcgtcatttgtcaattgatgaattaatggaagcaggaagaaacggaaagctgcaggaagcttttggaaccgggacagcagctgtcatttccccaatcggcaaattaaattataaaggggaaagtattaccatcaatgattttcaaaccggagaaatcacacagcggttatatgatacattgaccggaatccagtgggggaaattagaagattgcttccactggacgtatgaagtgaaatagtgtcgttcatacgtcccaattttttagagcataatattaaagcgggttatttgcacgtgttgcgatcagttcgcctgcgatgctgactgcaatctcggcaggagtctccgcgccgatggagagcccgatcggggacttgcagcggttaatctcttccttggtaaatccgtcagccagaagtttttcgcggagtgtctcgcattttcgtcggcttcccatgatgccgatgtaggagacgggtgtctgcatcacttgtttttggacaatgtagtcacagagatgtccgcgagtcataatgcagacatagtcttccggatgaaagtcgatcagatttgacagctgctcaaagtttccagtgatgcagcggcaggcagaagggaatagttctgggttggcaaattcttttcggtcatcgaagacgacacagcgaaaatccaaatgtgtcagtaccggaacaagttcctgcgccacatgtccgcctccaaagatatagacagttccggctttgatgaggggttcgatgtaataatgcctgccggcaatactatattcggatggctcttctggaagtgcatatccagaatctgtcaaattgcgcagtgaggcgtctatggtatcggtcatatactggaaggtccagttggattcttctgtcagatcgaggaggagccagagttgttttgcctgatcccagttggcgagcagtgaacggcactgatctagaaagactgtattctcatgggagacatattgaaaataggcagtgatctgaccgccgcaaatcattccgagatcggcagcatcatttggtcttaagacaaagtctttcaaaaaggaagtctgctcttggatcccgagaagcgcctgctttgttgcttcgtattcaatggagcctccgccaatcgttccgtgggacgttccgtcagcgaggacgatcatgcgggagccggcgccgcggggagcagagccggagctttttgtcacagtcacgatcatacagtcattttcggattctacatgttctaaaaggatttcaaaaagttctttcatagttttcataagattctccaatctaaatttttaatagttaatctttttccccaatctaaatttttaattaggaatcttttcctctaatctaggtttttaagaggtgttttttgtccggtaaaaatttcttgaaacagttctgaggcataggcagaaagctgttcttctgcgcgcagataattctgtaaaaataccgttccctcttttgtgagagaggaggaaccgcctccgcccccgcctgtttttgtgtgcagcagagaaaagccgagatgactttccacggacttgatcgtcttccagcctttgctgtaagaaatttgcatatgccggcacgcggtctgcatggaaccggtatgctcgatcagcatcaaaaaccgggctgtctcggatgtgaaaaatgggatttctcggcaaagctgaaattctccgacggcgtagattggaagtgtctcatttttattgaagcgttcagtatcggaatctacggtgtctgcggataaaatgatgccggaatcgctgacggaaacttctgctgtgcgggcggcgatagacggttggcgcaacgcaccgcgcagtccgttttcaccggtgtatgtcagtatttctgaaaataattcttcccggagcaggatcggatggccccggtgaccttcaaagaccgggcggacgcagggggcatcctcagacagcatggtctccagtgtctgtgacagaaggatcggatatttggcagggaggataaatacgctgtcgcagagatcctccatgtagttaagcccggtacagatttggtcaaacatagagagtgtttcataccgaggactgtacagacagatcgtctgcagcccggatatttctttttccacctggtcggcttcttctccggtgatcacggtaattggggaaattcctgcccgttttagagccaggatcacacggcggatgacagagacgtgatccagttccaaaagtggaaggaaagtgctgtcctgcttccctctctttgccgctaaaataatcgcacctgttttcataaagtctcaaaaactccttgtaatttctaagaaaattatatatgatgtatttcgatatgtaaataaaaacataacgaacggagtgagaaaattgaaattatgtaaaacagaagaggcagtcggacagattttgtgccatgatatcacacagatcattccgggtgtcgtaaaagatgccgtgttccgaaaggggcatgtgatcaaagaggaagatatccccgtactgttaagtgtcggaaaagaacatatttatgtgtgggaaaatgatgatacgatgcttcatgaaaatgaggcagcagaggttctatacgagatttgcaaaggggaagcgatgcatggctcagaggtaaaagaagggaagatcgaactgattgcagactgtgacggcgtgctgaagattgacagagagaagctttttgcagtcaacagtcttggacagatgatgattgctgcaagacatggagattttccggtcaaggccggggagaagattgcagggacaaggattattccgcttgtgatcgagaaggaaaagatggagcgggcaaaacaagtgacagaaggcggaccgattttttccattcttccgtatgtgcagaagaagatcgggcttgtgacgactggaagtgaagtctacaagaggagaattcaggataaattttcgccggtgatcaaggagaagctggcagaatatgacatggaagtggcaatgcatgagatctgcagcgatgaccatgaacagatcacagctgtgatccgggcgatgctggatgccgggatggatatggtcatctgtactggggggatgagcgtcgatccggatgaccgcacgccgcttgcgattaaaaacacaggcgcagagatcgtcacttacggagcgccggtgctgccgggagcgatgtttcttctcgcctactatgagggagaaagaccggttgtcggattgccgggctgcgtgatgtatgcgaaacggaccatctttgatctggtgcttccgaagcttctggcaggagagaagatcaaggcagaagaattttacgcacttggagaaggcgggctctgtctgtcctgcccggtctgtacatttccaaactgcggattcggaaaaggaggatattaatgagcggatttacacattttgatgcgagtggccatgctgtgatggtcgatgtcagcgagaagcaggaaacacagcgcgaagcgacagcgaaaggaaagatctatatgagtccggaatgttttgcgcttgttaaagcaggagaaatgaagaagggtgatgtcctcggtgttgcaaggattgccgggatcatgggagccaaaaagacatctgagctgattccgctctgccatattttaaatctttctaaagcggaaatcacattcacatatctggaggaaagctgcgcaatcgaggcggcgtgcacggcaaagacggtcggtaaaaccggcgtggagatggaggcgctgacgggagttaatatcgcgctgcttacaatctatgatatgtgtaaggcggtggataaggcaatgcgtatttccgatatccggctgtgcagaaagaccgggggcaagagtgggacacttattttggaaagcgaggacgaataggtgaaagattcgtatggaagagtcattgattatatgcggatttccatcacggaccgatgcaatctgagatgtcgctactgcatgccggatgggatcaaaagcattccgatggagaagatccttacactggaagagattgcagaagtctgccagattgcttcggaacttggaatcacaaaatttaaagtgaccggaggggaaccgcttgtgcggaaaggctgcatcgaactgatccatatgctgaaagcacttccgcacacagagcaggtgacgttgacgacaaacgggattctccttgcagtgtatgcgaaagaattaaaagaagcggggatcgacggcgtcaatgtaagtctggatacgctgtgcgcagaaaaatttgcggagatcaccggatatgacaggctaaaggatgtgctggaaggaatccgtaccgcacatgcgcttggactgaaagtcaagatcaacacggtacttcaaaagggcgtcaatgagggagaatgggaagcgttgctccagattacaaaggaaacaccgatcgatatacggtttattgagatgatgccgattgggcacggcagtaggaaggcatctgtctccaatcaggagttgttggaaaagatccgtggaagatatggcgaaatgacagaagaagcaaagaagcagcagagcggtgggcgaggagcattttctgggcatggcaatggaccggcagtgtactaccagataccgggatttcaaggaagtgttggatttattagcgcattgcacggaaaattctgtgacagctgcaatcgaatacgaatgacagcggaaggcttcataaagccatgcctgtgttatgataccgggatttcaataaaagaggcggtcagaaaccatcagccggagaaagtgaggcggttgcttgcacaagcaatttcagagaaaccggaagcacattgttttgaaaagaaagaggaaatcacagaaaagcgggaaatgtcccggataggaggataatatgggaatcatcaggggaatctgtacaagcgatatcagaggaattcaaaaaagcgaagtgcaggaagcagatattgaagtagactgggggattgttggcgatgcacacggggggaaatggcaccgtcagatcagtctgctttcgttggagcgcattcaggaatttcgtgagcgaggggcggatgtggaatttggcgcattcggagaaaatattatcgcggaagggtacgattttaaaaatcttccggttggttcgcgcttccagattggtgaagtgatcttggagatgacacagattgggaaagaatgtcacagtcattgccagatctttcggaaaatgggggactgtatcatgccaagagaaggcgtgtttgcacaggtgatccacggaggacatattaaagtcggagatgagatcaggctgctggagcaaagtgaataaaagagaagggaaaaggtggattcgatgcatctgaggaaaatggtgggaagcggaaagaaaacatggagacgggcaggcgccctattgctggcaggatgccttttgagcggaagtgcggttgggctgaccggctgtgccggaaaaaatgaaaagacggaaccgcaggggaaacaagcagaagcaaaagcaacacagaaaaaggggaaagcagatcccggcaagaaagaagagacggagatccaggtatttatcgctgcgagtctgaatacggtcatgacagaactggcagaaaattatgagaaggagcatccgaaagtgaagatcacttacaatgcggatagttcggggacccttctcacacagattgaagaaggatacgaatgcgatatttttttctccgcagcgcaaaagcaaatggatcagcttgaggcagacgggctgattgcggatgggacaagaaaaaatgtagtgaacaatcaggttgtccttcttacaagaaaggacagcggtaccgaggttaccggactggaagatctggacaaggcagagagcattgcccttgccaggggaagtgtaccggttggaaagtatacaagagaagcgcttgtcagccttgggatccttccggagacagaggatgtatcaaagattcggacagaggaagtgtcaaaagcactcggaggcgtggaaatcagcgagcaggataatgtcagcaaagttctgatcgctgtcacagaaggttcctgtgaggttgggacaacttactattcagatacacacggctatgaggatcaggtaaaggtacttcagacagtcagttatgatctgacgggaaatgtcatttatccaatctgtcaggtggaaaataaggaagcggatgatgcacagaaagaagcggctgcagagttcttagaatatgtcgtctcagacgaagcaaaagcgatttttgaaagttattattttgatacacaggtagaatagagagagtatcgtattaggaggaaggaaacatggaagaagtcagaaggatcatggcagaactggactggagtccgctttggatttctatgaaaaccggtgtggttgcgacagtaatctcgttctttttaggaatctacgcggctagaaaatctgttcaggcgggaccgagactaaaagcggttctggatggtatactgacacttccgatggtacttcctcccacggttgcaggttttttcctgctgctcatattcagtgtgcggcggccgtttggggcatttctatatggcaattttgacatcaaggtcgtacagtcctgggccggatgtgtgatcgctgcgacggtgatcgcattcccgctgatgtatcggaatgcacgggcggcatttgagcagatcgacatcaatctgatccatgcggcgcggacacttggaatgtcagagtttcgtattttctggacggtagttatgccgaccgcaggtccaggagttacagcgggaacgatactggcatttgcccgggcgctcggagaatatggggcgacttcgatgttggcgggaaatattccgggaaagacggggacaatctcccagaagatcgcgatggtcattcaggatggtgattatctgacggcaggcgtatgggtagggatcgtgatggtgatcgcgtttggaatgatcttcatgttgaatcttttgcttggaagacggatgagacatatcaagaggtggtagtatggcgatagaagtaaggatacatagagaatttgatgattttaagctggatgtacagtttcagtcggaaagtagaagaatcgggatcctcggagcatctggatgtggaaagagtcttacactaaaaagcattgcagggattgaaagacctgaaaccgggaagatagaatccgcggggaaggtcttttttgattctgcaaaaaaaatatggatgccgccgcaggagcgaaatgtcggttacttgtttcagaattacgcacttttcccgacgatgactgtggaaaagaatattgggattgcacttcgctgtggaaaaaaggaaaaagaaaaaaaagtgcgggacatgattgaacgattttctttgcagggactggaaaagaaacttccggggcagttgtcaggaggtcagcagcagcggacggcgcttgcgagaatcatgatttatgagccggatatgatactgttggatgagcctttttctgcattggacagctatttgaaggaacagacacagagagaatgcctggaactgcttcaagattatccgggcactgttattttggtttcgcacagtcgggatgaaatttatcgttttagtgaagaagtactggtgatggatggcggaaaagctgttatcaaaaaaacggtcaaagagttgtttgagcatccgcagaaagtagctgcagcgaagctgaccggatgtaaaaatattgaagagattgtatggaaagacgggaaacacctgtatgtgccgggatgggatatggtgattcctgctggaatgggaaacgtaggcgatgcacaggcaatcgggatccgggcgcatgaatttacaacagagcgtacagagtcagacagtgaacttgtatttccggtttacaaaccggaagtgacagaggatttatttgagtatcatgtacagtttttcacatcggaacgtgcaaaaactccagttgtgtggaaagtttccaagaaactctgggatgttggggaaaaaggtgtgccgaagtggctgcatctgaagagagagcatatattgtttttggagagagagtaggaagtttccggaaagagtagaaaatatgctagaaaaagcgtatgatagcagaaagaagcatatggaaagaaattttgaaaaatgggagaaagaaatatgaagttatttgacttgcattgtgatacacttgttaccttgggagagaaaaaggcagattttttctgcccggaaacacagttctcattatgtgagctggaaaagttcaggtgcttttgccaaacgatggcgatttttattccggatcaagtccgaggagaggatgcatttgcatattttctcaagtacaaagaatatttggatcagcttttgcagagacaggcagaagttgtggaaaaaatcaactgtggagcagatatcagacggattaccgggcaaggaaagtgcgcggtaattttggcggtagaaagtggtgcggcgcttggaggaaggatagaacgtatagatgatctggcggagagcggcgtaaaaatcatgacgcttgtctggaatggaaaaaatgagcttgggtcaggacatgataccggggaagggcttacgccgtttggaaaagaagtaatcagaaaaatggaagagaggagaatgatcgtagatgtctctcatttaaatgatcgaggatttgatgaagtctgtgaagtggctgcgcgtccgtttgttgcaactcactcgaatttacggtcaatctgttcgcatccgagaaacttgaaagaagaacagttttgtgaaatggttatacgaggaggattggtagggatcaatcttcatcaaccgtttttaagtgatacaggagaggggaaagaggaggatgtgtatcggcatattgaccgcatgttggagttaggtggagaaaatgtgatcgcatgtggaagtgatttcgatggagcggatatccatttgtcgttaaatacgcctgtgaaatatgcagaacttgcagagaagatgttaaaaagagggatcaaagaagcggtagtagataaaatcttttttgaaaatgcagagcgatttttcagagaaaatgtatagagggatgtgcagggtgggaaaagtcctgccctttttaaattgctgaaaaaaacacttgacaacagaaagttttcatgatacagttaaaaatgcgctattgtggataataatgcccgtagtgcgcatatgaaaacactcataaatgcttgttttcattgtatattcaaggaaaatacaacgcaaccaaataaatatacaaggagtgaaacgtcaatggagaaaaatagaattcgtcccatcacaaatggaaaaagttcccgtatgagctattctagacaaaaagaagtattgcagatgccgaacttgatcgaagtccagaaggattcttaccagtggtttctggatgagggattaaaagaagtattccgcgatatctctccgattgctgattacagcggtcacttgagtctggagtttgtagactttacattatgcgaagatgatgtgaagtatacaatcgaggaatgtaaagagcgtgatgcaacttatgcagcaccgctgaaagtcagagtaagactttataataaggaaaaagatgagatcaacgagcatgaaatctttatgggagatctgccgctcatgacagcgaccggtacttttgtaatcaatggtgctgagcgtgttatcgtaagccagttagttcgttcccctggaatttattatgcgattgcccatgacaaaatcgggaaagaattattttcatcaacagttatccctaaccgtggggcatggctggagtatgagacagactccaatgacgttttttatgttcgtgtagacagaacaagaaaggtaccgatcacagtgctgattcgtgcacttggatttggtacgaatgcagaaattattgaattattcggagaagagccgaagattcttgcaagctttggaaaagatacggctgagaattatcaagaaggtcttctggaattatataagaagatccgtccgggtgaacctcttgcagtagacagtgcagagagccttatcacaagcatgttctttgacgcgagacgctatgaccttgcaaaggttggacgttataaattcaataaaaaacttgcactgaagaatcgtatttccggacagaaagcggcagagacagttgtaagccctctgacaggtgaagtgcttgtagaggaaggacagctcattacaagggaacttgcagaagcaatccagaatgcagcagttccatatgtatgggtacagggagaagaacgtaagatcaaagttctttccaatatgatggtagatttaaaggcgatcgtagatatcgatccaaaggaagttggagtgacagaggcagtcttctatccggtactggcaggtcttctggaagaaacagcaggagatgtagaagaactcaaagatgcaatccgcaagaacatcaatgagctgattccgaaacatattacaaaggaagatattcttgcttccattaactacaatattcacttagagtatggacttggaacagacgatgatatcgaccacttaggaaacagacgtatccgtgcggttggagaactgttacagaaccagtacagaatcggtctttccagactggagagagttgttcgtgagagaatgactacacaggatctggatggtatttctccacagtctctgatcaatatcaagcctgtaacagcagcagtgaaagaattcttcggttcttcacagctctcacagttcatggatcagaacaacccgcttggtgagctgacacataagagacgtctctctgcacttggaccaggtggtctgtcacgagacagagccggattcgaggtgcgtgacgttcactattctcattatggaagaatgtgtccgatcgagactcctgaaggtccgaacatcggtttgatcaactctcttgcaacctatgcgagaattaacgaatatggatttatcgaggctccgtatcgtaagattgataagacagatccggcgaacccggttgtcacagaagaagttatctacatgacagcagatgaagaagataactaccatgtagcacaggcgaatgagcctttggatgaagaaggacacttccttcacaaaaatgtttccggtcgttaccgtgaagagacacaggagtacgagagaaagatgttcgattacatggacgtttctccgaagatggtgttctcagtagcgacagcacttattcctttcctggaaaacgatgatgccaaccgtgcgctgatgggatccaacatgcagcgtcaggcagtgccgcttcttacaacagaagcgccggtagtcggaacaggtatggaagtgaaagccgctgtcgattctggtgtatgtgttgttgcagagcaggcaggaactgtggagcgctctacatcaaaagagattacgatcagacatgaagacggaacaaagaaaacatataaattgacaaaattccttcgcagtaaccagagcaactgctacaaccagagaccgatcgtagtcaaaggagaaaaagtagaagcaggtcaggtaatcgcagatggaccatctacatcaaacggagagatggcccttggtaagaacccactgatcggtttcatgacatgggaaggatacaactacgaggatgctgtacttctgagtgaaagacttgtacaggatgatgtttacacatctgtacatatcgaagaatacgaggcagaagctcgtgatacgaagttaggaccggaagaaatcacacgcgacattccaggtgttggagatgatgcactcaaggatcttgacgagagaggtatcatccgcatcggtgcagaggtgcgcgcaggagatattcttgtcggaaaagtaactccgaagggagagacagaactgacagcagaagagagactgctccgtgcaatcttcggggaaaaggcgagagaagtaagagatacttccctgaaagtacctcatggagaatacggtatcgtagtagatgcaaaagtatttacaagagaaaatggtgatgagttatctcctggagtgaaccaggcagtccgcatttacattgcacagaagagaaaaatctctgtcggtgataaaatggccggacgtcatggtaacaagggtgttgtttcccgtgtacttccagtagaagatatgccgttccttccaaacggacgtccgcttgacatcgtgctgaacccacttggtgtgccttcacgtatgaacatcggacaggtacttgagatccacttaagtcttgctgcgaaagcattaggatttaacattgcaacgccggtattcgacggtgcaaacgaaaatgatattatggacactctggatcttgcaaatgattatgtaaatcttgagtgggaagaatttgaacagaaacataaagaagagttgctgccggaagttatgcagtatctgtcagacaacagagaacacagaaaactctggaaaggtgttccgctctcaagggacggtaaagttcgtctccgcgacggtagaaccggagaatattttgacagcccggttacgatcggacacatgcactatctgaagctgcatcacttggtagacgataagatccatgcacgttctactggtccttactcactggtaacacagcagccattaggtggtaaggcacagttcggtggacagagattcggtgagatggaagtttgggcactggaggcatacggtgcatcttacacacttcaggaaatcttaactgtaaaatcagatgacgttgtcggccgtgtgaagacatacgaggcgattatcaagggagataacatcccagaaccaggaattccggaatcctttaaagtactcttaaaagaacttcagtcacttggacttgatgtcagagtactcagagaagaccagacagaagtagagatcatggagacgatcgattacggtgagacggatttacattcaatcatcgaaggagacagaagatataattcagaagaagaatcttacggggaacacgggttcagcaaacaggagtttgacggagaagaacttgtggacatcgaggaggatctgacggattttgatgcaactgatgacatcgattttgaagcaattcttgacgaagaatagaagaagggagtgccacaaatgacagccacaaataatgaaacatcatatcagccaatgacgtttgatgcaattaaaattggattggcatcacctgagaagattttagagtggtcaaggggagaagttacaaaacctgagacaattaactatagaacattaaaaccagagcgtgacggtctgttctgcgaaagaattttcggaccaagcaaagactgggaatgccactgtggaaaatacaaaaaaatccgctacaaaggcgttgtctgcgaccgctgtggtgtagaggtaacaaaggcgagtgtccgccgtgagcgtatgggtcatattgaccttgccgctccggtgtctcacatctggtattttaaaggaattccgagccgtatgggactgatccttgatctttctccgagaacacttgagaaagtattgtattttgcttcctatatcgtactggataagggagagacaaacttacagtacaaacaggtgttatctgagcaggaataccaggatgcaagagaggcatggggaaataatttccgtgtcggaatgggagcagaagcaattcaggaattgcttcaggcaatcgatcttgagaaagaatatgtagagcttcaggcaggattagaaggagcaactggacagaagcgtgcaagaatcgtgaagcgtctggaagttgtagaggcgttccgtgattccggaaacaaaccggaatggatgatcatgactgtgatcccggttattccgccggatttacgtccgatggtacagcttgatggtggacgttttgctacttctgacttaaatgatctttacagaagaatcatcaacagaaacaaccgtctgagaagactgttggagttaggtgcgcctgacattatcgtccgcaatgaaaagagaatgcttcaagaagcagtagacgccctgattgataacggacgccgcggacgtccggtaacaggaccaggaaacagaccgttaaaatcactttccgatatgctgaaaggtaaatccggacgtttccgtcagaacctgctcggaaaacgtgttgactactctggacgttccgttatcgttgtaggaccggaactgaagatttatcagtgtggtcttccaaaagagatggcgatcgagttattcaagccgttcgtaatgaaagagcttgtagcaaacggtaccgctcacaatattaaaaacgcaaagaaaatggttgagagattacagccggaagtatgggatgtcttagaagacgtgatcaaagagcatccggttatgttaaaccgcgcccctactcttcacagacttggtattcaggcatttgagccgattcttgtagaaggtaaggcaatcaaacttcatccgcttgtatgtacagcgttcaacgctgacttcgatggtgaccagatggctgttcaccttccgttgtctgtagaagcacaggcagagtgccgcttcttactcttatctccaaataaccttctgaaaccttcagacggtggtccggtagcagttccttcccaggatatggtacttggtatctattacctgacacaggaaagaccgggagcaaagggagaaggaaagtactttaagaacttaaatgaggcgatcctcgcgtatgaaaatggcgtgatcacgcttcactctaagattaaagtgcgtgttacaaagacaatgccaaacggtgaagtgaagactggaaatgtagaatctacactgggaagatttatctttaacgagatcatcccacaggatcttggatttgtagatagaagcattccgggaaatgaactgcttctggaagtagacttccatgtaggaaagaaacagaataagcagattcttgaaaaagtaatcaatacacacggtgcaacaaagacagccgaagtattagacttaatcaaggcgacaggatataagtactctacaagagcagcgatgactgtttcgatttctgatatgacagtgcctccgcagaagccggagatgattcagaatgcacaggatactgtggatagaatcacaaagaacttcaagcgtggtctgatcacagaagaagaacgttacaaagaagttgtagagacatggaaagagactgatgataagctgacagaggcactgttatcaggacttgataaatacaataacatcttcatgatggcagattccggagcccgtggttctgacaagcagatcaaacagcttgcaggtatgcgtggattgatggccgatacaacaggacgtacgatcgagctcccaatcaagtcaaacttccgtgaaggtcttgacgtattggaatacttcatgtctgcccatggagctcgtaaaggactttctgatacagcgcttcgtacagccgactctggatacctgacaagacgtcttgttgacgtatcacaggaacttgttatccgcgaagtagactgtgtggaaaaaggcgctgagattccaggtatgtatgtaagagcattcatggatggaaacgaagttattgaaagcttacaggaacgtatcacaggacgttattcctgcgagactatctgtgacaaagatggaaatgtgcttgtaaaagcaaatcatatgattacaccgaaacgtgcagagaacatcatgaaatacggtgtgaatgcacagggcggagagattacagaagtgaagatccgtacgattctttcttgtaagtcacacatcggaatctgtgcaaaatgctacggtgcaaacatggcaacgggagagccggtacaggttggagaagcagtcggtatcattgctgctcagtcaatcggtgagccgggtacacagcttacgatgcgtacattccatactggtggtgttgccggtgacgatatcacacagggtcttcctcgtgtcgaggagctttttgaggcaagaaagccgaagggtcttgcaatcatcacagaatttggtggagttgcaaccatccatgatactaagaagaaacgtgagatcattgtgacaaacaacgagacaggagaatccaaagcatatctgatcccttacggttccagaatcaaagtgcaggatggagcagtattaggagcaggtgatgagctgacagaaggtagtgtgaacccacacgatattctgaagatcaaaggactccgtgcagtacaagattacatgatccaggaggtacagcgtgtataccgtctccaaggtgtagaaatcaacgataagcatatcgaggtcattgtacgtcagatgctgaagaagatccgcatcgaggaaaagggtgatacagaattcttaccgggaacaatggtaaatgtacttgaatttgacgatgtgaacgagaagatgatcgcagaaggaaaagagcctgcaacaggtgttcaggtaatgcttggtattacaaaagcttctcttgcaacagattccttcttatcagcagcttccttccaggagacaacaaaagtcctgacagaggcggcaatcaaaggtaaagtggaccatctgatcggtgtgaaagaaaacgtattgatcggtaaactcattccggcaggaacaggtatgagaaaataccgtgatgtaaaactggatacagatatggcaatggaagatgagatttctttagaagactttgagacatttacattatctgaggaaagtgtagcagagctagaagcacaagatgtattggtcgaggatttatttaattcgatagaagaataaaagaggagggtgaggctgaaaaagtcttgccctcttttgctgcgcggaagacattctgctggatattacataagaggtttgaagaaggagacatgtatggttgactggatcataggaattggagttgctgtgctggttgttttgattatccgacagcagtttcgaaagaaaagaaatggacaaagtggatgtggatgaggcggttgcagcggttgtgccggaacttgtccgacggacagaaaagatcagaattgacagtagaaagaagaagagaatataataaaaaatagagggttctgctgggagaatttatcagtgaaaggagaaccagacagaaatagattaagagatagcaggaggaagaaaaatgtttcaagataagctgaaccgtgtattgaatgcgatgaaagacgcaggactggaacaaatgattgttgcagatcctgcatcgatctactatctgacaggaagaatgatcctgccgggagagaggatgctagtactgtatctgaaccagaatggagatcacaagctgatcctatctaaacttttcccgcaggaaggagaagttggagtggatgtcatctattttgatgatgtggaggacagtgtggaaatccttgcacgatatgtggaaaaagagaaaaaagtaggagtggacaagatttggcccgcaaaatttttacttcgtctgatggaactggaagcaggaagtgcgtttgtcaatgcttcttttgtactggacgatattcggcagatcaaagatgcagatgagatttgtaaaatgaaagaagcttccagactgaatgatatggcagtggagcgactgataccgcttgtgaatcaggggatgacagaacaagagttggcagaagaattgcagaagatttatctagaactgggtgcagaaggatattcttttgagccaatctgtgcttatggggcaaatgcggcagatccacatcatatgacagatacggtcagtgtcggcaaaacaggagattcggttgtgcttgatattggctgtaagaaggatggatattgctctgatatgacgagaaccgtctttatcggtgaggcttctgagcaggcaagagaagtgtatgataccgtgcttcaggcaaatctgagggcgattgcggcagtaaaaccaggtgcgcgtttctgtgatgtggacaaagcagcccgagattacattacagagaaaggctatggaccatattttacacaccgcaccggacactgcatcggacaagaagtgcatgaggcgggggatgtttcttctgtgaatgaaaacgtgttgaagccgggaatgatcttctccatcgagccgggcatttaccttgaagggaaagtgggagtccgtatcgaagatcttgttcttgtgacagaagaagggtgcgaagtgctgaatcgagcagataaagcattgagaattatctaagatggtagtaaaaaatatgttgaatatgcagctgatgatctttcttcttgtgatcattggtttctgcatccgaaaaaaggggattgtgggcacagaggggcggaagaacatggtagacctctgtctctttgtcacacttccgtttaatattattcattcattttttatggaatgggattgggggatgatggtttcctgcgcgatcgtattgttcctatcaattggatataatgtagtcagtattgtgacgagttttgtatgctaccgaaaagaaccgcattacaggcagaagacacttcggtatgggacgatcgtgtcaaacggtggtttcctcggaaatccaattattgaggggatttacggaagcaacggacttttttatgcatctatttttatgatccctgtccggattgtgatgtggacgattggaatgtctgtgtttatgaaaggaagcgggcaggaagaaaaagcagggaaacacagcctgtttcgaaaagtgatgaccaatccctgcattgtggcggtctataccggggcaattctgatggggagcgggatcagccttccgacttttctggaaaatactatttcggggatcagcagctgcaatacaccgctcagcatgatgctggtagggatgatgcttgccgaaatgaatccgaagggacttttgaccaagtccgttgcattttacacatttgtccggctgattgttgtgccagggattgtgtttggattgacggcactgcttccgatcgatccgcttcttcggggaatcacagtgatcattgcggcgatgccgacaccgattacagcagtacttctgtcaggaaaacatggaggagatgaacagtgcgctgcgggaatgctgtttgtatctacgcttctgtcactcgtgacgttgccgatctggtgcatgtttttatagaaaagcagggaaagcagaaaaaagtttgcaggattgcgacttttttttgctttttttgtctgggtgcttgacatttggggaaaatcgtaatagactaatagagcgtgcataggaatatgtatattttttatgcacaaaaagagtgaataaaagctcagcaaccaggagttcttcgcgaaaagaagaacaggaaatatcataggaggtgaaaggaatgccaacatttaatcagttagtaagaaaaggacgtcagacatctgtaaagaaatctacagctccagctcttcagaaaggttacaactctttaaaaaagaaagcaactgacacatctgcaccacagaaaagaggtgtgtgtacagcagttaaaacagctacacctaagaagcctaactcagctcttagaaagattgccagagttcgtctttctaacggtatcgaagtaacaagctatatcccaggagaaggacacaaccttcaggaacacagcgttgttctgatccgtggtggtagagtaaaagacttaccaggtacaagataccacatcgtcagaggaacacttgatacagcaggtgttgctaagagaagacaggcgcgttctaaatacggtgctaagagaccgaaagacgcaaagaaataagaatcagtaacaaaaatcgtatcacaaacagaactatgattccagtaggttgcgggttatatcgatagagatagtaagtcccgcacgaacacattatcattagaaagacacatgtgagtaccgatgaattaattaagtaattttgaacatttcaaaacaatgattaaggagggaaggaccgtgccacgtaaaggacatactcaaaaaagagacgtattagcggatccattatacaataacaaagtggttacaaagcttatcaacaacatcatgttagatggtaagaaaggtgtagctcagaagattgtatacggagcatttgaaagaatcgaagcaaaagctgagaaaccagcgattgaagtattcgaagaagcaatgaacaacattatgccagtgcttgaagtaaaagcaagacgtattggtggagcaacatatcaggtaccgatcgaagtaagagcagacagaagacaggctttagcacttcgttggatcacattgtattctcgtaaaagaggagagaagacaatggaagaaagactggcaaacgaacttttagatgcagctaacaacacaggtgcatcagtgaagaagaaagaagacatgcacaagatggcagaggctaacaaagcatttgctcattacagattctaagggaggaaaaagtcttggctggaagagaatatccattagatagaactagaaacatcggtattatggctcatattgatgctggtaaaacaacaacaactgagcgtattctttactatactggtgttaaccacaaaatcggtgatactcacgaaggtactgctactatggactggatggctcaggagcaggaaagaggtatcacaatcacttcagctgctacaacatgtcactggacactgcaggaaaactgcaagccaaaagctggtgcgttagagcaccgtatcaacatcattgatactccgggacacgttgactttacagtagaggttgagcgttcactccgtgtacttgacggtgcagttggtgtattctgtgcaaaaggtggagtagagcctcagtcagaaaacgtatggcgtcaggctgacacatacaacgtaccaagaatggcattcatcaacaagatggacatcttaggtgcaaacttctacggagcagtagaacagatcaaaacaagattaggtaaaaacgcaatctgtatccagcttccaatcggaaaagaagatgaattcaaaggaatcatcgacttatttgaaatgaaagcatatatctacaacgatgataaaggtgatgatatttccatcacagatatcccggaagatatgaaagaagacgcagagctttaccgtacagaattagttgagaaaatctgtgaattagatgatgacttaatgatggaatacctggaaggagaagaaccttcaacagaagcattaaaagcagctttaagaaaaggaacatgtagctgtgatgctgttccggtatgctgtggtactgcttacagaaacaaaggtgttcagaaacttcttgatgcagttatcgaattcatgccttcaccacttgacgtacctgctatccagggtattgatgaagacggaaacgatgttgtaagagaatcatctgatgaagaaccgttctcagcattagtattcaagattatgactgacccattcgtaggtaagttagcatacttcagagtttactctggaacaatgaactcaggttcttacgtattaaatgcaacaaaaggtaagaaagaacgtgttggacgtatcttacagatgcatgcaaataagagagaagagcttgacaaagtatactcaggagatatcgcagcagcgatcggatttaagttttctacaactggagatacaatctgtgacgagcagcacccggtaatccttgagtctatggaattcccagagccggttatcgagttagctattgaaccaaagacaaaagcttctcagggtaaattaggtgaatctttagcaaaacttgcagaagaagacccgacattccgtgctcatacagatcaggaaactggtcagacaatcatcgctggtatgggtgagcttcaccttgaaatcatagtagacagacttcttcgtgaattcaaagtagaagcaaacgtaggtgcaccacaggttgcttacaaagaatcctttacaaaagcagttgatgtagacagcaaatatgcaaaacagtcaggtggacgtggacagtacggacactgtaaagttaaatttgaaccaacagacgtcaacggtgaagagacattcttcttcgagtcaacagttgtcggtggtgcaattccgaaagaatacatcccgaaggttggagaaggtatcgaggaagctatgaagtctggtacacttggcggattcccggtagtaggtatcaaagctactgtatatgatggttcttaccatgaagtcgattcaagtgaaatggcattccacattgcaggatctttagctttcaaggaagctatggcaaaagctgcaccagttttacttgaaccaatcatgaaagtagaagtaacaatgccagaagaatacatgggagatgttatcggtgacatcaactctcgtcgtggacgtatcgaaggtatggatgacctcggcggtggtaagatcgttcgtgcatatgttccattatctgagatgtttggttactctacagacttacgttctaagacacagggacgtggtaactactcaatgttctttgagaagtacgagccagttccgaagaacgtacaggagaaagtgttatctaacaaaaacgcttaatcaaccgtaaaatatatcgtatctgacaaccggatatggcttctgagattttcttaggcagattcggttgtttgatataaaaaaatcagaaaaaggcttgaaaaacaatgcgatttgaaatataatcgaagtagtcgagttaaactgaaactaatagaattgtcttcgttaagaagacatataataaggaggattattcaaaatggctaaagctaaatttgaaagaagcaaaccacatgctaacattggtacaatcggacacgttgaccatggtaaaacaactttaacagctgctatcacaaaaactcttgcagcaagagtagaaggtaacacagcaacagatttcgagaacatcgataaagctccagaagaaagagaacgtggtatcacaatctctacatcacacgttgagtacgagacagagaaccgtcactacgctcacgttgactgcccaggtcatgctgactacgttaagaacatgatcacaggtgctgctcagatggacggtgctatcctcgttgttgctgcaacagatggtgttatggctcagacaagagagcacatcttactttctcgtcaggtaggtgttccttacatcgtagtattcatgaacaaatgtgacatggtagacgatgaagagttattagaattagttgaaatggaaattcgtgaattattagacgaatacgaattcccaggagatgacactccaatcatccagggatctgctcttaaagctcttgaagatccaaacggagaatggggagacaagatcatggaacttatggcagctgttgacagctacatcccagatccagaacgtgaaacagacaaaccattcttaatgccagtagaggacgtattctctatcacaggacgtggtacagttgcaactggtagagttgagcgtggtacacttcacgtatctgacgaagttgaaatcgttggtatcaaagaagaaacacgtaaagttgttgtaacaggtatcgagatgttccgtaaacttcttgacgaagctcaggctggtgacaacatcggtgcattacttcgtggtgttcagagaacagaaatcgaaagaggacaggttcttgttaaaccaggtagtgttacatgtcacacaaaattcacagctcaggtttacgtattaacaaaagacgaaggtggacgtcacacaccattcttcaacaactacagaccacagttctacttcagaacaactgacgtaacaggtgtttgccacttaccagaaggtacagaaatgtgcatgcctggagataacgtagaaatgtctatcgaactgatccatccagtagctatggaacaaggtttacgtttcgctatccgtgaaggtggacgtacagtaggatcaggaagagttgctacaatcatcgaataattaaaagatgaataaattttgagggattgccgtaaggcagtccctttttgcatgacaggttgccagtttgtatgataaaatatttttgtattttaagtaagagagaaaagggataactacaaaatgttaaaacagtcttacacatttcaaagtccaatcggtatcctgacaatttcagaagcagatggatatctgacaaatctttttttagaaacggaaaatgttattttgttatcggagaagcaatccgaacatcgctatcatctgcattcggatgttctatatgaaacgtactgccagattcgggaatatttcgcgggagagcgaaggaattttacaattccaatcaaggcagaagggacagcgtttcagaagcgagtatgggaagagttacgaaaaatcccatatggggaaacgaggagttatgcagagattgcagcaggtataggaaatccgaaagcagtccgcgcagtcggacaggcaaataatcgaaatccgattttgatccttgttccatgccaccgtgtgatccataagaatggagatatatctggatttggatgtggggatgatgtgaagcgatatttgctggaacgggaagggagaagaaacaagagatggaaatgagagcagatgggattatttttgatgtggacggtacgttgtgggattcgacagagatcgtggcaggtgcatggaatcaggcgatcatagaagaggggatcacagacgttcatctgactggagagattttaaagggattatttgggaagacgatggatgtgattgcgaaaaatattcttccagaggctacagaagaacagagggagcgtatcctggagcgatgctgtcgatatgagcacgaggcgctggctgccagcgaagaggacattacttatccacaggtaatagaagttatacgaacactggcagagaggtatcctctgtttattgtcagcaactgtcagagcggctacattgagttattcttagagaagacagggcttggcaagtttgtgacagatatggaatgctttgggaatacaaaacgtccaaagggagagaatatcagaagcgttgcagatagaaatggactagattttccggtctatgtcggagatacgctcggggactatgaagcgtgtgagattgccaaggtaccgatgatatttgcgggatacgggttcggtgaggcgccggatgctgaggcagaaatagggcagtttcaggaacttcttgagatcttttaagagcagtttatatactttttgcaaaaggataaaggatataagaaaatgactttttgcaaaacaggatatgatatgagaaaaatatagaggtttttcggtaaaaaagtgttatactaaaaggagtatgacactttttctgtattaggaaagataggagcaaatggatgacacaaaagaataatttattgagaaatgcctcttttttgatgattgcggcgttaatttcaaaagtgattgggttgctgtataaaagcccgctgtcggagattgttggagaaattgggattggttattatgggcttgcacagaatgcgtatctgattttgctgatgatcgcatctttcagcattcctcaggcagtatcgaaggtgattgcagaacggctggcatttaaggaatataagaatgcacagaagttcttcagaggtgcgttggtctatacaatgatcttaagtggtgcaagtgcgctgttttgtctgtttggagcaaaatacatgattccaagtaatcagccgggagcgactcttgcacttcaggtattagcgccgacgattttcttgtcagggatccttggggtataccgtggatattttcaggcgcacagcaatatgcttccgacctctttgtcccagattattgagcagattctcaatgcggcagtcagcatcggggcggcatggctttttatccatttcttttccgatggaacaaaagaaggaattgcaaaatggggggcagcaggaggaaccgttggaaccggagcaggtgtattgatcgcgttgctttttatggcagctgcctatgaggtcaaccgaaaacagatcgcacggcatgtgagagcagatcagaccgggaaggaagatagttatcgagagattttccgtgttttatttctgattgtaacaccgattattttcagttcgttcatctataatatcaacggttatatcaacggtgtcatgtattccgaactggcaggcaggcaaggggtaaactcggaggtggtgagtacactctatggtgagtattcggtctattttcttacgattatcaatattcctctgacgcttgctggagcggcgcctacatcgatgattccggaggtgtctgcactgtatgcacagcataggaggaaggcggccagaaggaagatcgatgaggcgactcagttgtcgatgtttatttcaattccggcggctgtagggcttgcagtattggcttatccgatcacaaggctgttgtttccgaatacgaacggaaccgccggtactttgctgctcatcggtgcagtaacgattatttttaacacaaactcaaatgtatcgaatggtgttctgcagggaatcggcaaggcaaatctgccgatgtggaatgcggcgattgcattggtcattaatgtcgggctgcttgttgcgcttcttcaactgacttcacttgggatttatgcagtgctggtggcaacgattgtctattcaattgtcatctgtattttaaatgatatttcaatgaagaagtacattcattataaaaatccatggggaactgtctatctttgtccgcttctggcatctattccgatgggagtggcagcaggtgggatttattatcttttggagcttgttaccggatctaatctgatcggtcttttgtttgcaattgccatcggaggaatgatttatctgagtttttatacaacgatcatgactaagctgaaagctatggagaaaaggcggcgtatggaacaaagatacaaaagagaacgggcaagagagaaacggtagatgaaacaaagtgagatgttctgcatagaataatgataaagaaatttatcgggggtagaaacatgccatattcaattatgttagatgccgggcacggtggacgtgacccgggagcagtatataacggtagacaggagaaggatgatacactgaagcttacgttagcgattgggcagattttacagaataacggattagatgtagaatatacaaggacaacagatgtgtatgagtcgccgtatgagaaggcaatggaggcgaacaaagccggagtaaatttttttgtgtccattcaccggaactcctatcccactgccaacgcagtatcaggggtagagtcacttgtctatgacaaatctgggattaagtatgagatggcacagaatatcaatgagcagctagaatccattggatttgtgaatctcggggtcaaggcaagaccgaatctgatcgtgttgcgcagaacaaaaatgccggcagttcttgtggaagttgggttcatcaattcagacacagataatcagctgtttgatgataattttcaggatattgcagaggcaatcgcgtcaggtattcttgataccttggagagcagcagtggcggaaccgtgccgggaagtggtggaactgccggaggagcaggaggaagataccgtgtccaggtcggagcattccggaatcaggtatatgcaaataacttgttaagagagcttcaggagcaggaatatcccgcaagaattgaagactctaacgggttttaccgtgtagtggtcgggagttatccgactttgcaggaggcagcgcagatggaacagcggttaaaatgggcaggatatccaacgattgtgatccattaagcagtgaaactacatggcaatagagcataatgctttacaaaagcagggaaaataggtagaatagggaaatatacaaagcagaaaagaggataaaagtatgagtgatagattagaatttcgggagaaactaggaggaattcttcagaaggctcagggagcgcagaatgtactttcggtaagagaagtagaagaatattttgcagaggacggactttccagagaacagatggagttggtctgcgactatctgctgtcgcagaaagtagcagtcaaaggctatgtaaaacagggaggaactgttactgagaagacagaagaacaggcagaggagcactatacagaggaagaaaagcgttatctcgcacgctatatggaagaaatcaaaacaataaaggcagaggaagcaggcgagcgacaaaagttatttgcagcctcgatagaaggagatgcacttgcaaggggaagactgatcgagctgtatttggagaaagttgtggaagtagcgaaagagatgtatcacaaagaagtatttctcggagatctgatccaggagggaaatgtaagcctgatgcttgtactggatgaattgaaatccgcagaggaagcgcatgggaagattatggaggaagtacgcgcgggaatgcagatgctgatcgaggagcagacagaagtgaagcgaagagaccatacgcttttagagaagtatacagatttagatgataatatcaagaaactgaaagaggaaacaggaagagatgtaacgatagaagaagtatctgcctttctggatatgacggaagaagagatcaatgatattctcaatctgggagaacaataggtgaatgcatagaaaataaaaatgttgctgtaaaatggtaagataccatattgcagcaacatttttgttagattagaagtcgaaagagtcttcttctttccgatcgtagaatccttccggaatatataagtgaacactttctacacgattcttctggagtgcctccacgacgagccggattccatcatctgtcgtcaattcatccccctgttcaggaagacggtcaagatgttcgatgatgaatccaccaagggaatcgtagtcttcagaggaaagatttaatccgaggctgtcgttgagatcgtcaagattcatggaaccttcaatgatatattcccggtcattgatctgacggacaaactcctcttcgttctcatcgtactcgtcatgaatctcgccaacaatctcttcgagtaagtcttcgagggtaatcagtccggcagtttctccatattcatcgaggacgatggcgatgttaatcgaagcctgtcgcatttctactagcaattcagagatgctcttatactcgtaagtaaaataagcttctcttaaaatatctctgacatgaaattccttcttgtcattgtaattgtataacagaagatccttcatattgattgtaccgacgacattgtcagtggtctcttcgtagatcggaagtcttgtaaacttgtcctcacggaaaatctcgatcagttcatcgtaagtgctgtttatatcagcgaacgtcacatggacacgaggcaccataatatcttttgctttggcatctcccatatcaaatacattgtagatcatttctttttcttctgattcaatcacgccgtcctcatggctgacatccacgatggtccgaagttcgtgttcggtcattgtgttgaccttctgatccggattgacacgcagaagaaacagaactcccatggaaagcttgttcacaataaaaatgaccggggtaaaaatcttcatcagaaaatggatcagcggtgcataaagcagcgccatcttttcggaatggatcgttgccagtgtctttggagaaatttctccgaagatcaagattaataaagtgatcacaccggtcgcaataccgaccgcagaatttccgaatagctgaatgatcagagacgtcgtgagcgcggttgccgcattgttcacgaggttattcccgatcaagatcgcactcagcatcttaccagaatcttctgaaatctttagaagaatgcgggcgcgcttgcttccctggtctgccagagattgaatttttagtttgttagaggttgtcaaagaggtctctgccgatgaaaataatgctgataaaagaatcagtatggctaaaataattaattgtatgacgacactcgagtccaatgataagttcactccttttttgctttacattttgcttctaatataccgtatttcgggagattttgcaagtgtacattgaatttgcgggggctttatagtatgataaagatactgcccggaggaatacttcgggacaggatgaataagaacagaatgaatgatgcatatagatagaagcaggagatagagcatgaagaaagaattttatgacgcattgatacagctgaccgaagaaaaaaatgtgctaacagacgaaccgttgaaaaaccatgtgacgttccgtgtcggaggagcagcggattactttgtatcaccggagagtgcagaagaagtacagaagattattctcttatgcaaagaggcaggaatgccatattatattttaggaaatggaagtaatcttcttgttagcgatcagggctaccgaggggttatcatacagatttacaaatccatgagtgagatttctgtaaaaggagaatttgtgacagcgcaggcaggtgcgcttttatcggcaattgcagcaaaggcagcaggagagtcgctggctggatttgagtttgcttccggaattccgggaacaatcggaggagctgcagtgatgaatgccggagcatacggcggtgagatgaaagatgtgctggagcaggtgacagttctgacaaaggaaggagaactgctcacgattccgagagaggaactggatatgggatatcgcacaagcaaggttgcgaaaaatcagtacattgtactggaagcggtaatccatcttgcacatggggagcaagaaaaaatccgggaaaaaatgaatgaactcaaagagaagcgcacgacaaagcagccgttggaatatccaagtgcaggcagcaccttcaaacgtccggaaggatattttgccggaaagctgattgaggaagccgggttacgaggatttcaagtaggaggcgcacaggtatcagaaaagcactgtgggtttgtgatcaataaggataatgcgacagctgcggaagtacgagaactgatccgccaggtatcggagcgcgtaaaggcaaattccggggtgacactggaaccggaagtaaagatgttaggagaattttaagatgagatttgtgatcgttacgggaatgtccggtgcgggaaagagcactgcattgaagatgctggaagatgttggatatttttgtgtagataatcttccgattcctgtgattccggctctggcaagtcttttgagtggggccaattcagagattgataagctggctcttgggattgacattcgggatgagcggaattttacagaattagaagaagtgttaaagaagattgatgacactggatttgcttatgaagtgttgtttcttgaggcaggggatgatgtgctgatcaagcgatatcaggagacaaggcggactcatccgattgcaggaaatgagcggctggataaggggatcgaactggaacgtgagaaattaaagtttttaaaatccaaagcaacatatattgtagatacaagtaaaatgctgacaagggaactaaagggtgaactcaacaaaatttttgtagagaataaagagtttaaaaatctgtatattacagtattgtcgttcggatttaagtatggaattcctaatgatgcagatctggtattcaatgtgcgtttccttccgaatccatattatatagaagagctccggccgatgagtggaaatgacagtccggtcagtgagtatgtgatgaaggaaccaaaagcacaggaatttttagagaagttaaaagatatggttacctttctgattccaaactacattatagagggaaagaatcagcttgtcattgcaattggatgtaccgggggaaagcaccgatctgttacactggcaaatgaactgtatcagtttttgaagcaggatgacagatatggagtaaaggtagaacaccgggatattgaaagagattcatagggaaaagtaaaataaatggaaaaaatgtcattttcagcaaaagtaaaagaagaactgtccacgcatatgagcagtgcaagacattgtcaaattgcagaacttgcggcgatcataagtatctgcgggagaatttccatctccagttcggatagataccgggtgacggtacatacagaaaatataactgttgcaagaaagtactttacattaatcaaaaaaacatttaatatatgtactgaaacttctattcgaaagaaccttaaaaaaggaagtgttttttattccgttatcattgcaaggcacgaagaggcagtgagagtgcttcaggcagtgaagttattggatgatacgggtgaaattagagaggaactttccattgtaaagaatgtggtgattcgtcagctatgctgtcggagagcgtttctaaggggagtgttccttgcatcaggttcaatcagtgatccttacaaatcttaccactttgaagtggtatgtgcgactgaagacaaggcgaagcaattacagtatattatgaacagtctgcatatgagtgccaagatcgtgcttagaaagaaatcctatgttgtctacctcaaggaggcagatcagatttcggatatgctaaatatcatggaggcacatgttgcactgatggagtttgaaaatattcgtattttaaaagatatgagaaacaccgtgaatagaaaggtaaattgtgaaactgccaatattaataaaaccgtttccgcagcagtcaaacagctggaagatattgtatatatcagagatgagattggttttgaaaaattagcagacggattaagagaggttgctcttgcgagaatcgcctatccggaagcaacattgaaggaactaggtgacgcactgacaccgccagtcgggaagtcgggtgtgaatcatcggctaagaaagttaagtgagatcgctgagaaggtaagagcgaacaaggaggtacacaatgattaggaaaccagtaacaattcaacttgacaatggactagaggcaagaccaattgctctgcttgttcaggaagcaagtcaatatgcaagccaaatctatattgagatcaaggaaaaaagaattaatgccaaaagcattatgggaatgatgagcctgaacgttcccagcggagaagagctgacagtagttactgagggtgaggacgaagaaaaggcagcacagggtattgaattgtttttaaataatgtaaagtaaaagaggtaggaaaaagagcatgtgatatgctcttttttatcctataaaaatagtagaaaggagaacgcgatgaagaaattattatttatttataatccgaacgcagggaagggactgatcaagccaaaactgtcagatgtacttgatatttttgtgaaagcaggatacgaagtgaccgtttatccgacacagaagtaccgggatggatatcacaaagtgcgtcactttaaggaagaatatgacttagttgtgtgcagcggtggagatggcacgcttgatgaagtcgtaaccgggatgatgaagagaaaagaacagattccaatcggttatatcccgactgggacgacgaatgattttgccagaagtttacatattccaaaagatatgctaaaggctgcagatacggcagtgaatggaattgtctttccgtgtgatatcgggaaatttaaccacgatttttttgtgtatatcgcagcattcgggctttttacagatgtttcctatcagacaaagcaggaagtgaaaaatgttctcggacatcttgcatatgtgctggaaggaatgaagcgcctttataatgtgccgtcttaccggattaaagtgacgcatgatgatcaggtgatcgaagatgaatttatcttcgggatggtaacaaattccaggtcgatcggcggattccgaaatatggttggaaagagtattgtatttgatgacggagagtttgaagtgactctgattaagacgccgaagaatccgttagcattgcaggagatcatcgcagcgattctgatcgaacagattgatacaaaacatatgtatacatttaaggcaaacagcttgaaactggagtctctggaagagattccgtggacactggatggtgagttcggaggggaacatgatgaagtgatgattgagaaccaaagacagaaattaaagattatggtgcctatcgataaagtcaaatctctgatgaaggaaccagatacgttacaattagaggaaggaattgaagaggattaatggaaaagagagaaaaattttcatcccggttggggtttgtattgatttcagccggttgtgcaatcggtcttggtaatgtatggagatttccatatattacgggaaaatatggagggggagcatttgtacttgtatatttgtttttcttatttatacttggtctgccgattgttgttgcagagttttcagtagggagggcgagccagagaagtattgctacttccttcaataaattagagccaaaagggacaaaatggcattgctaccgttattttggaatggcaggtaattatttgttgatgatgttttatacaaccatcggtggatggatgcttgcgtatttcttcaagatgctcaaaggagaatttacaggactgaagccaaaggaagttgagcaggtatttgctacatttacatctgatcgaaatgcgatgatcttctggatgttattaatttcaatagcaggattgtgtgtgtgttcgcttggacttcagaaaggcgtggagggaatcacaaagatcatgatgtctacgctgtttgtaattatggcggtgttggcggtgaagtcactaacacttccaaacgcaatggacggtctccgtttttatcttgtaccggacttcggtaagatgaaagaggcagggatcggtactgtgatttttgcagccatgggacaggcattttttacactgagcattggaatcggggcactgtcaattttcggaagctatatcgggaaagaacgagcactgactggagaggccatcagcgttggtttacttgacacaacagtggcgattgtttctggcctgattatttttccagcatgttttgcatttggaatcaatccaggagaaggtccgggacttgtatttgtcacattgccgaacgtatttaacgagatggcaggcggaagagtgtggggaagtctgttcttcctgttcatgacatttgcggcattttctacgattatcgcagtgttccagaacattatcacatttgcaagagaaatgtgggggtggtccttacagaaatctctgctcataaatggtgcgcttttgatcctgttaggacttccgtgtgtacttggtctgacagattggtctggaatacagatccttggaaagaatattatggattttgaggatttccttgtcagcaacaacctacttccactcggatctttgatctatctgttattctgtgtgacaaaatatgggtggggatgggatcatttcctgaaagaagccaataccggaaccggaatcaaattcccgggtggccgtccgatgaagttgtaccttacatttgttcttccggcggtaatcttgtttatctttgtgcagggatatatgtccatgtttgccggaggaatgtaggaaaaatcagcagcagaagccgaggggcgaaaagcgcctggtttctgctgttgaaatctataaagggaaggtttgggcgatagataagaattgttcgagtatagaagcaaaaaatagaaaaacaaaaaagtttaaaaaatttgaaaaaaattgaaaaaaagacttgcataatcctaaaaagtgttctatactatacaggtaccaaacaaatggctccatggtcaagcggttaagacgctagcctctcacgctggaatcaggggttcgattccccttggagtcattcttttagagtcttgaaaaccctataaaataaggggtttcgggactttttttattgctgtaaaaaacgcagggtatcaagtagggtatcaaacgtaaaatcagagcaaaatttaggaaaggaagcatacgaaccgaaaaggattgaagtttcaatatcttcttaatttttgacttctttaatagtttattatttggaggaggttgagtttacaatggatattacaaaagaaattttgagacgtgcgaccatagacggaattacagaatatttgctttatggatctgcaatcgaagcaaaacggacggagagagactataacaagaagttagaagaaagttatagcaaaaatgaagatgttttaagcgaacacgaaaagaaaacggtttcagaactgatagattcagcgaatgaaatggcaagtgatgtttcagaagtttatactgcacttggtttgcgagcaggtatgaagattatgcaggaattgttaaaaagtatagagaaatagacttttcctctgtttgtttcttttcattaaacagcgttccgcaggatgccccgagcgacggttcctaatagggcggcgggtcggcggggcaagcgttacgctgacagaaaattatgggttctttctatttgataatccgagcatataatcagcagacacatcgtaaaatttgcataatgctatgagataatcaataggcattggtcgcttttctaattcatattgagaataggttgtttgagcaactcctagcatatcggctacgttcttttgagaaagatcattatcttgtcttaaatttcgcattcgttccgcataattcaaaatttatcacctcaaggtgattttattataaaaagaatttgagtattgacttctaagtcacagcgagttaatatataaatataactcggagcgagttaaaatgctgatgataaatgaatttgaagacaatagaaatgagaggaaagataagtggatttgattgcctttggattcgataagaaaaaagggagagatacaaatgaaaaagaaatttgttgttgcgttggtggctgctatgtctttgactgttgcaggaacgggaacagtatttgcgatggataaagtatcaacagtagcaagcgaaaaagagcatgtacatggggataactgtgaatggattgtagacaaagaagcatggacagaaacagtagaacatccagaagaaggtcattacgaagaagtagttgtgcaggaagcttgggacgaagaagtaactgtaattaaaaatgtttgtcacaactgtggttatattataacatctcaagaagatgccgttaagcatttaaaagaaaattatatgaatggttgtcaatcatatggtcaaaaggagtttacagaaatcatccaccacgaagcagtagtagagcagcagtggaaggtggacaagccagcttggacagaaacagtaaagcatccagaagaaggtcactgggtatgcaacggagaaccgcaagagccagatcagaagccagagaacccagatcagaagccagagcaaccggaaaatccagatcagaagccggaacagccagagaacccagatcagaagccggaacagccggagaacccagatcagaagccagagcaaccggaaaatccagatcagaagccggaacagccagagaatccagatcagaagccggaacagccggagaacccagatcagaagccagagcaaccggaaaatccagatcagaagccggaacagccagagaatccagatgtagaaacaccggatgcagagaatccagaaacaccagaacagaaaccagaagcaaataaggaaaatgttcagacacaagcagcagaaacaaagaaagagggaacaacaccaaaaactggtgacacagcttcctcacttccggttgcaggagtaggaattacttcactcggagttgctcttgcaacaatcttaaagaaacggaaataattcaatagtttgatttaattgaagcctaatcgcttatgcgtgagggcttctttttttgtgcttaaaaatagggattttattgaagaacatgctttgaatacctaaaaagggtaggagatgctcttcaccagaactaattagttgaagaatactctataaacattgaaaaataggggagatatgtcttcatctagaattagatggttggaaaacatgctctggatagctagaaagaggggaagatagcctaaacagagataacttaagttggaaaacataccttaccccctaaaacagtgggaagtttgccggagtagagatggctttctcgagaacaatggaggaaacttcggaaaagtattagtaaatttagaaaacgccctttttgattttagaaaacgattaacctctgcggaggtatcgtaatatgaaagagaaaaaacagatttcagttaacatttgctacctattggagcaaaagaaatggacattaacaaagttgagcacagaaattaaaaaaatcatccgagatgataagagaagggggaaatcaatgttttctgaatatgcaagtggtgggaacatgagatcttatatgtttttcgtggtatgccgtgcgttggaagtggatcccgatacaatgataaaaccggttaccgaaataaaagaatataaaaaatgggataattttccatcgagcttagaagagtataaaaagcagttgcaaaaggttttgggaagtcaaataaaggcaggaaacatggaagcttttattgaacaatttgaaagcaatgcgagtcagttgggagcagatcaagatgatggagaaatatctaatgccacatattaccgctattcagaaaaaatgggaaatatttcaataggtagacttttaattttatcacggtgttttggtatttctttgaaacaagttgcaggacttgagtaagtgttcggttttgtgagaggagaaaaggaaataaattagatacaatagaggtgaagggaggaaatggtaaatgagaaaagtaaggattcgttctccaacaaaagaaagtcctcatgacagaggactctctactgtaactgtaaaccgaatatgtggtaacagttttgtggcaagatcattataccgcatattttcacgatttaaaagatatagaggtgttaatatgaagaaacattttcaagacagtttaatgtgcgtatgggatattcgtcatagaaaagccggaagcgcaaaaattgatggaaaggaaatttcatgggaggatgcagatcaactgattggaatcccacttgaaagttcatcagcaaaagtgatgaaacatgctattttaccggaaaaggtggaagtaatatcgcagaaactggaacacatttcatggggagcacttatccagttgactttttctggaaaatatgtgacggatgttgaagtgttatgtgactggctgacagatttttataatgaggattagccgctctacggcggtatctcattacaaggagggatattatgaagaatttttttaaagaactcttagatatgaagagtaaagaggttgagaatgttactccgcccaaagatacggaaatggaagttcaaacgaaaacaagtttggcagatcgttacaacaactggtgggagcgggaaaatgcaaaagcatttttgcggcaatatcccgtatacggtgtgcggatatttccagtaggacaaacttctttttatgaagtatgcttcggtgctgttttggacaaatttttcttttctcatgggaaatggagacatgtccagaaaacggaatcttacagttcgtatccagagatttgtgtatcgtttgtatgcgcagaggtttatggattaaaagatacttggaatcgtagagacttaaacctgcgagagattattctgatggagttacagcgtgcattattacaatacacgcgatcgagaggggtagatatttcgaggtgctctgatcgatgtgtttctggcttgtggatgataggaaatacgctgattatggaggttccggattcagcattttcatgttgtcatccggggttagtagaaatattggcttcagatgattataaagaaaagaaaaaggtttttgatctgcacaatcgactttaaaggttgaagagagaggttttatgtctgctttttgaagctactgtggtagcggagaaaagcaggctaagaaaccgaaaagtttatggaatgtagagcagagaaaaaagcctttaaatgttgaaaatatagtgttttcatggtctcagggcttgtcagagaccatgtagaaatgtagaaaaaggagtgaaatacatatgagaaaaagaaaaacgaatcaaggtaatcttagtatgagacggtgtgagatcgttagtaatttagaatcagaagacggagaagagttatttagtatagagaggatgaagcaagttttagaagaaaagtctaagacatgtataaaggagttttcctatattatacatgataaagatgtatatacagaagaagatgagcgaaaaaatgaaaagtataaatgtggagaattaaaacccaaacacattcatttgctgttgcgattttttgagaatcaacctcagaaacttaaaaatattgcaggctggtttcaaattccaccgaactttatttctaagattcataatcggtgggatagcgctgtgttatatcagattcacgctaattgtccagaaaaatatcaatatgatattagtgaagttactgcaaattttaagatagaaaatgtaatcaataattttatgaaaagaaattctattgattccattataatggatattttaaacggcgaaattccagaatatcaaagatctgtgataccgccgttgttccgtgtacattatgctcgagaaatcaatgaagcatttcgatgccgagttcaaaatttacaagaaacagtaaagagtagaaaaatggagtgtatttacattaccggatcttcgcaagccggtaagactacgttagctaaaaaaattgcggaagaaaaagggcttccatattatatctcatctagtggtacagattttctgggggagtatgctctggaaccgtgcgttatcctagatgatatacgtccgagctctatcaatttaagtgaattgcttaaattattagataacaatacagtctcggcagtgaaaagtaggtacaagaataagtgtcttgctaattgtaagctattgataataacaactgttttagatattgagacattttatcataacgtgttttcagaagaagatgagccgatgattcaattcaaaagacggtgtggcacgcatttgcgcatgaacaaagaaaggatttacatttcaagatgggattctttaaagaaagagtatacggaagagacggaatatctcaatgatattttagacagatatatgccgaaagaagatcagacagagcaagatgttatcaattatgtttcagaaacaatgccttttttaaaacaagcagatgaaagtgaaaaaatgcatgggtttgagatcatagatgatttagaaagtccgtttaaataagaagaatcaaaataaatatatcgtggtaaggaaaggagtaaatcaatacgcccaatgtaatgcaatgtaacgctatgtaaagcagttcaaattttttcgggcagtaagttattgattttaaaacagcgtatgacataaacacattaaatgaacagaaatgaaaaagttgaattattgacttatttgatagaaagtgataaaatcgacgtggttcgtatgcaagaggaaatggagcaaaaacgtaaattagaactcttaagtatgcatccgtttgaaatttggcagggaaaggatggaatatggaaaacatatcttccagacgaaaaagcaggaagaatttttcgcaaaagaaaaacagagaaagaaattcagaaagttgttgtggaatattggcaacaagagattgaaaacccaacggtaaaggaaatttatgatcagtggattgctaaaaaattagaatggcaggaaattagtaaagcaacaaaagacagatatgataggcaattcaaactttgctttcaagaatttggaaagcgtagaatcaagtcgattagggaagatgatatagaagatttcttgaaatgtgcaattaaagatcatgaattgacacaaaaaagttttagtaatttaagaacgttggttctaggtatttttaagtatgcaaagaaaaagaaatacatttcatatagtatttctgaaattgtaaaagaccttgatatatcaagaaaggcattcagaaaggttagaagaacagatgaagaattagtgtttatggaggatgaattgccaaaaattcaaggatacttagaaacacatgcggatattaaaaatctatgtttactattactattcaaaaccggtttaagaccgggagaagtagtggcattgcgaaaagaaagtgtgaaagggaacataatctctgttgacagtacagagatatgctataaagatgaattagggaaagacacatatgaggttcggcagttcccaaaaacagaagccggtatacgtgatgtgattcttccagaaaagtatttgtggattattgagaagataaagttacttaatccatatcagccgtatttattcatgcaaagtggaaaacgtttattggaacatcagataagaagtaggttgaaaacagtttgtaaaaactgtaatattcaatctaaatctcctaataaaatacgaaaaacttatagtagtatattattagacagtggggtacaagaatctatagttattcagatgatgggacatacagatatagcaactacaaaaggtcattactatcgtaatagaaagaatgaacaagaaaagataagtgttataaatagtgttgtcaatctatagggtatcaaaaaggtatcaaaaggtatcaaaggaaagatattagaaactcagaaaacaagtggaaattcaacgtttacagaggaattataaaaattccggcggagttcgattccccttggagtcacttttagaattggcggaagacctttaaaatgaaagggtttttcgtcttttttgtttgctggaagatatataatatttgtcttacgttttctcagatttacggaaggttctgcactagatatagtggatccttttgttttgctataataaaaggttcttctatgatttttattttatcagagtagaaccttttgtattttatttaggagaaaaaattttatacttttatgctcaagaaattatgcggaataaacaagtaactcttccatgtgcacatttaggagtgaagataaggcaagcaaattatccagagaaggaagagacttcccggaaaaccaattataaacagactgattgctgatattaaacagtcgttcaattgcacaagcagaaagattattttcctcacatagagaacgaatattttccccagtttttatcatatctatctgaggataattaaaaggtacaaaagtcgtcatcaaaatcaccttcacaatcattattgatatcatcatcatcttcctcatcccaattccaattcagaccatccgcttcttccttatcccagtacaagtcatcttcctcttcagaatcatcagataagaagtcttttaaatcttctgcaggaaatagggaataaggagtaaagacttcatcatcattttccattttgacatcggagtcttttccggtgtcgatattttctgcagaagaaaattcattttctgaaatcagttttgagaaattacataagtttctttttaaagtttgataatgctgttctccaagaaagtcttcgaccgtatccaataaatataaaatactgctgcgtgcagcaggaatagccatatctagtgtagccattgcatatgtgcataatgaaacaagtcctttttttgaataggaagaatcgtttcccattacaaacccttctttaggctgcaaagcatatgcaaaaagttggtcgacggtttctttgaagtattcgttgacagtgatatagttctcggtatcttttttgcatgacaatatatcgatgagtaattttgtgagttgatacaagtttgttatatgtaattctgataaatatcttcgatagagttttttctccttttttgtcatgtattttgctggtgtcattttaaatcctccttatttgaaaacaatatgttagtagttctgttgtgatcacacttatagtatacgggtgggagaaaaaactcgaaagagagtataaaaaatatttttatggttgttccaattggtagttggagtattagattgtgtagcatatagggtattttttgtcaaggggataggaaaaatatttttaaatatttttaaagtgtataaaccattttttagtgtccagtttgtgattgaatgtggaaatcagaaaaatttgatatgcttgatgtaagtcacaagaagaactagagtgacatattaagatgagtctatgagtcactatggggaggaagtttatgggcaatattttgaggagtgattaacagaactatatgactatcttgagagagaaggctatgctccattactctattcagaacttgaagttggtatttatgtgcatgataagaagattgaaatattaggggtaaaaaatagtacaggttagcagtagagaggtgacaacaatgatttatattacaggggatacccatgcaaattttaggcgtttttcaagaaaacagatgccttatcatttggaaaaaggcgattatatgattgtgtgtggagatttcggtctgttgtgggcgaaagataggacctttcaatataatttaaaattttttgagcaaagaacatacacaaccctgtgggtaagtggaaaccatgagaattatgatatgataaaagagtatccaaaggaactttggcatggaggaatggcgagacatattgtcagggataaagtaatcctacttgagcgagggcaggtctttgagatagaaggaaagagatttttcacatttggaggagctgcaagtcatgatattcaaggaggaattttagatttggatgatccggaatttatggtgaagagacagcgggcaaatcgatcctaccttccatatcgggtgaaaaatatttcatggtgggaagcggaacttcccacagaggaagagatgaaagagggaaaggagaatctggaaaaaatcaattataaagtagactatgtgattacgcactgtgtatccaatcggattcaagataaaatagaagaaaggtattatggtggtggaacttatggcagaagttattttccagatattctgacagggtatttggaggaaatagagggaaaattgcagtatcaacattggttttgtggacattatcatatgaatgaagaaatagacatgaagcatacggttctatatgaaaaaatcattccgctcaatcagtatgaaatgaaagggatgtttcaaaaacaggagtaggtggagaaatggataagattattagagggggtgaaagccactggatggagaagacattcgtggatgaagaaatagcagttcgctttatctggtttaaaataaagtattttctaatcaggaaatacaagctacaaggtgtctgtggaaaagagagaatatgggcatagaaaggaaatggctggaatacatgtttagcgtggggggattcgattcacctcataaaaggaagaaagaagagagtgggacagataaagacggaagaaaacgataggattatcccaaagaacatttttcggaaggtgtggtggaaacgtactggtggataacacttggagaacatgaaaaagaattagagggactgtcatatgagatgatcacatgtctgatataagatatccctgggaggaaggatagatgttttttgtgaagaatgaaaaaggagagtacatttgtgcaagatgcggatgtggtgggaagattacaaaggatcattttattccgaaatcgtgtggaatgactgtaaatgaagaaggaaattatgtcgggatttgtgagaaatgtaacagggagaaaggagatgacattgtattaccttcgtggtattcttttcttccgagagggcagcaagaggaactgaggagatacttaagatatgcgagaagttatgttttgcagaagtgtaaagatgaggaagttgagaagtatttgagggaaatgaagagggagtagaagatgccggattgctttgaaatccggtatttttgttaagaaaagattgtttgtcatagattaaaaatgaaaaaattttcgaaaagtattgacaaacagattgttgatgtatataataaaagtcagtaaagtcagtaaagctagtgatagcagttttgtcagatgggttgctttaaaaactacatttaaaaaaggaggaatttagtgtgcgaacagaagcagttgcattaagagtggtgaattatggtggagatgtccctcgggatatcatcaatcagcattttaaaaaactgaagttatctggccgagtctattattcaacgggggtcatttttgaagaaagcaaactccgggagatcaaaaagttgattctttttttcgaagaaaacaactgcaggcggtatgttgttgccgatgttatcaaatctttgaaatataatctgaaaaaggaagattcaagccagtgcattccaaaggatagttttttatggagcgtgaagaaatatgagaatatagctgcaaatacttggtttttaatagaatctttgagagtcccaagccaagaagagattgattcttttcaggttaaatacatggctgaaaatcaagtttatgttagacggttggaagacgtactagacgcgtctacgcgacctaacagagtctattgttctcagtttcatgagtgtagtgaagaaattgaagacgaattctgtttagtttaggcccagagggataattaacaatttttcaatgacagatttctctagagatcaaaggtaactaaaaaattatttgtaaaaaaggggtagtttttgatactatctatttaatgatggaggtttggatatgaacaatttttggcttatacctatggattttagaacctgtaattatgaacaaatgaaagaggagtgggatgaaaataaaaaaatcatgtgggaagcacctggaaaacctacgaacaaaaacggtgaatggactgtcgaaaatactatggctaaatcgttaaaaaaaggggatgtggtgtatttttatgttactaatttaccgtcagaaagtaacgtcaagctaagcagaattatgctaaggggaaaaatagaagatgagccctatccgatagaaaaaaataaggtttataggagtttaaaagaaacgacgatgataagtggtttttctattggctctatttcaactttacataaagagctactagaaaataatttatttttgagtttaaaagacttgaggaaaagagataataattttcaatatccacgaggaaaaaattggcctgacaaaaacagtaaaaaaagtttcagtcaagatttgattaaaacattagaagaaagttttaaagttggtatgcgagagaatgattttgaagtattaatgaatcattttaataaaaaatgtttcttttgtggaaaagatggaaatggacataagacatttgtggggaggaatggattagattactttgaatatcatcactttattctacaatgtgtagctaaaaaatttccagaattgcaggatattatagattcaccgactaatagattatccttgtgctcaaattgtcataataaatttcattatggaagagttgaagaagtgagcagaatgatagaaatagttttggaggacagcgaaattaataaaatgttagaggaatttgattttcaaaaaaatataggagaaaataaggatatttttgagtggtttcaagaagtatatagcgtaaaatagggaaattagactatgaaaaaagtttataaataagatcttctatgataatgataggtgaaaggcttgattaaaactagcttttcaccttgatttatatatagcagttataaaattttatatcaaagaggagtaatttttctggtggaagagcctgtggaacaacactcttcttagatccagcagtttcagtactcttttgtgtattattaatgatcagctaatgaatagtataaataccagatagcagcctatttttgattaattttccaagatttgtaggttcatatccgtacacattacctgttagattcaaatttctacaatcttttgagtaggttgctgtagttttgtgttcatatccgtggatattgattgtctatgggaatccgatgattgtcttgtgagaaacttttcaatagtttcaacgctaagtctacatgttttttgtaataaactagtcctgttggatattcttatcacttcctcgtgtggtcgtaagtgtttttcatttagattatccaaaattacgaaactttccaccggtttcccatatcattctcttagctattgatcgatttcattgtcgcgatgcacgttctctgagagtggagttcgatcccccaattttaatccaaattctcgaaacttattctgcaaaaccctaaaaagtcgaaattcccgtttgcgaaaaaacattttctagaatataggtgttcaggtatatctaatcaaaccgccaggtagacgatagtatgattttgtcatcagcacgatttaccaattgctttcattccccaaagcgcctctctgttcttattaaaaaatacatttttgagtaggtaggaaagtatcaatgaaaatatcatacggaaacgtatttttcaatcatgctgcaactggaaataaaaaatctactgtcgagaaaatttatggaaattgaatttgttccaactatggattgatgtcggtttcagagtgaaaatggtatcctaatatcaaacaaggaacaactttttgattacagataatacaaatatatttgtaggagaaagttctattatggaaaatagattattgattacacaggcattggatgaaagagatttgccggtaaaaagattacgtctaaaattgcagtattttagtcggcggatgtaaaaaagaacaatgaagaaaaagttttggaaaacagtataggagaggaagcaagctttcaaaaaatatgggagtttttaagaaccatttattccactaccccaaattagataaacagtttttgtattacgtcattagtgaatgaaaaatgtttaaccgatagacgagctttaaatatttgtattttttgaatcttagaatatgtatggagaatcatactgaaatccgggaagtatggtttggtgtcagcttgattgctgcctgttttccgctcggctgtattatgagcaatataaaatgagagtgatatagtgtgaattattatgttgcaaattcacattttggaaaatgaacggtttgaaagtgaatgatacagcagaaagggaatcggtattgaaagccagcgtacaaagtgtgtggctataaaattttgttttccttcagattggttgaatcacgttttcgtcaagagtgatactcacttttgtttttaatggtttcatgttaaaagtctcctttttaacttaaatatatcgttagtattatcaagtatcgaccagtagtatcaagtaggataaagcaaaaatataatatttatattattcatagtccagcagtgtgatgttaagtgagaaatgaataataaatcaaatatcgttcatatatctcacgaagacaaaaaatatccacctaagccctgttaatcatatttttttaaaatgagcagggtgtagattatcagcaagtagaagttcttctactctgctgaaatatataggagattgcctttgagcagtacaaagaccaaacgcacaaatttacgagtagttaatgcgagtgcatgtttgtgttgatatctgtttacttctttgtatttgagacggtggaaattgctatatttaggaaagaaaacatactaacattttttctataaaagatagtggtatttacaaagaaaagttagttataaatatggaggttggatttacaatggacattacaaaagaaattttaagacgtgcaactatacaaggtattacagaatatttgctctatggatccgcaatcgaggcaaaacagccagaattagattataacaaaaagttagaagaaagttatagtaaaaatgaagaggtattaagagaacatgaaaacaaaacagtttcagaactgatagattcagcaaatgaaatggcaagtgaggtttccgaagtttatactgcgcttggtctacaagcgggtatgaaaatcatgcaggaactgttgaaaggcatgaataaatagcaaatttccttgtttgtttacattcaaaaaacagtgtcttgcaggatgccccgagcaacggattctaacaggttggtggggcatcggggcaagcgttacgctgacagaatattatgggttctttctatttgacaatccgagcatataatcagcagatacattgtaaaatttgcataacgctatcagataatcaataggcattggtcgcttttctaattcatattgagaataagttgtttgagcaactcctagcatatcagctactttcttttgagaaagatcgttatcttgtcttaaatttctcattcgttcagcataattcaaagttatcacctcaaattgattttattatagaaagaatttgaggattgactttcaagtcggtgcgagttagaataaaaatataactcggaacgagttaaaaatgtgttgaatttaaggatgatagaagaggggatagaattcgggttcttaaatattgtctttagattcatgaaggcaaattttaggaggagatacaaatgagaaagaaatttgttgttgcgttggttgctgctatgtctttgactgttgcaggaacgggaacagtatttgcgatggataaagtatcagcaatagcaagcgaaaaagagcatgtacatggggataattgcgagtgggtagtggataaggaagcgtggcaggaaactattcaccacgaagcagaatacaagacggttcatcatgaagctgaaggatattatgaaaaacaacaagtacaagtaggtactaagcctatttacgaaaaacagaagcatgcaatttgtcaaacatgtggtggtatagatataggtctttacgaagatcctgtagaaggcggtttatctaaagagtatggagaacatatcggatatcatgcggatcgtggtgaattccgtataacaataaaggctaaatgggttgatgtacaagttggtgaggagcctatttatgaagaaaaggatatctggattgaaacaaagccggcatgggatgaacaagttcttgtaaaagaagcatatgatgaggtgattaatcacccggaagaggggcattgggtatgtaatggagaatcacaagagccagatcagaaaccggaacagccggagaatccggatcaaaagccggaacagccggagaacccagatcaaaagccggaacagccagagaacccagatcagaaaccggaacagccagagaatccagatgtagaaacaccagaagtaccggaacagaaaccagaagcaccaacaacaccagaagaaaataaggaaaatgttcagacacaagcagcagaaacaaagaaagagggaacaacaccaaaaactggtgacatagcttcctcacttccggttgcaggagcaggaattgcttcactcggagttgctcttgcaacaatcttaaagaaacggaaataatttgataattttatttgatcgaagcctaatcgcttatgcgtgagggcttctttgtatgggacgttgtttactaaaagatagatgagcataggaaagaaagagcggacgtatgattacacccacttgtttttctattttaattaaaacagcaggcaagatacgaccggaaagtttctgtgataaaaaggtttccttttttttacatatgcggtataatagggcatgtgaaataacgtaaaagaagcggaggaagaaacatgttagtatcagcaaaagaaatgttagaaaaagcaaaagcaggtcactatgcagttggacagttcaacattaacaacctggaatggacaaaatctatcttattaacagctcaggaatgtaattcaccggtaattctcggagtatctgaaggtgccggaaaatatatgacaggttataagacagtagtaggtatggtaaatggaatgttagaagaactgaacatcactgttccggtagcacttcacttagaccacggaagctttgaaggatgtatgaagtgtatcgaagcaggattttcttctattatgttcgacggttctcactacccgatcgaagagaacgttgcaaagacaaaagagttagtagcaatctgtgctgaaaaaggaatgtctctggaagcggaagtaggttctatcggaggagaagaagacggagttgtaggaaaaggtgagtgtgcagaccctcaagaatgtaaggcgatcgcagatttaggcgtaacaatgcttgcagcaggtatcggtaatatccacggaaaatatccggaaaactgggaaggacttagctttgagacattagatgcgattcagcagcttacaggggcaatgccacttgtacttcacggaggaacaggaattccggaagatatgatcaaaaaagcaattgaccttggtgtagcgaagatcaatgtaaatacagagtgtcagttagcatttgcagcagcaactcgtgagtatgtggaagcaggaaaagaccttcagggaaaaggattcgatcctcgtaaattattagctccgggagcagaagcaatcaaagcaactgtaaaagagaaaatggaattattcggatctgtaaacaaagcttaatatttgcagaagaattgttcagagataattgaaaagagatttcgggaaaaaagatcagtgtgactgcaccgatcttttttccttatcaatatttataagaaattacaagtgttaggaaccttgctttttttctgaaattagagtatcgtattaaagtgtatttgaaaacgaaaacaaaagcgaaacaaatatttggaaggatgggaatatgagcgaagtaatgaaggtaacggaaatatttggggaaaatgtctttaatgatgctgtcatgcaggaacgtctgccgaagaaagtatatagagaattaaagaagacgattcaggaaggaaaggagttagagacttccattgctgatgttgtcgcacatgagatgaaagagtgggcgatcgagaagggggcaacacactactctcattggttccagcctctgacaggagcgacggcagaaaagcatgatgcatttatttctgcaccgaagcaggacggaaaagtactgatggaattctcgggcaaggaacttgtcaaaggggaaccagatgcttcctcctttccttccggaggattgcgcgccacatttgaggcgagaggatatacggcatgggattgtacttctcctgcatttgtgaaaaaagatgcggagggaaatggagcaattttatatattccgacagcattctgttcctacaatggagaggcgctcgatcaaaagactccgctgctgcgctcgatggaggcaatcgataaggaggcaatgcgtctccttcgtctgtttggaaatacgacctcttctaaagtaatcccatcggtaggggcagagcaggaatactttcttgtagatcgggaaaagtatttaaagagaaaggatcttgtattcacaggaagaacactgttcggagcaatgccgccgaaaggacaagaacttgacgatcactattttggtgcgatcagagaacgaattgcagcgtttatgaaagatgtgaacaaggaactgtggaagcttggggtatctgcaaagacacagcacaatgaggtggctcctgctcagcatgaacttgctccgatctatgcacagtgcaatgtggcagtggatcataatcagcttgtcatggagacattaaagcaggtggcatacaaacataaccttcagtgcctgcttcatgaaaagccgtttgcaggagtgaatggatcaggaaaacataataactggtcgctgacgactgatgatggaatcaatttgctggatccaggaaagacgccgcacgataatatccagtttcttcttgtgctcacttgcgtattaagagcggtagaccgccatgcgaaacttttgagagagtcagcagcagatgtaggaaatgatcagcgtctcggggcaaatgaggcgccgccggcaattatttctgtctttcttggagaacagctggaggatgttttggagcagctgatcagtaccggggaagcgacacatagtctgaaaggcgaacgactgcacactggcgtgtcgacacttcctgattttacgaaagatgcaacagaccgaaatcgtacttcaccatttgcgtttactgggaacaaatttgagttccgtatggttggttccagagattcggttgcagcgccaaatgtcattttaaatacaattgtggcggaagcatttgcggaggcatgtgattatctggaagaggcagaagattttgacagaggtgtccatgatctgatcaaaaaatatgcttacgaacaccagagaatcgttttcagcggaaatgggtactcagatgagtgggttgaggaagcaaagcggagagggcttccgaatttaaaaacaatggtagatacgattccggcattggtagaagaggaatcggttgaagtctttgaaaaattcggtgtatttacaagagcagaattagagtcaagagcggaaatcaaatatgaggcatatgccaaagcggtaaatattgaggcgagagcaatgatcgatattgcaagcaaacatatcattccggcagtgattacctatattacatcgcttgcgaagtctatcaatgaagtgcgtcaggcatgtgcagtagcggtgatcgatgtgcaggaagaacttcttacccagtcatcgaatcttcttgcagaaacaaagaatgcgctaaaagagctggagaaagtaacagaagaagctgcaaagaaagaggaaggaatggagcaggcatgcttttttgaacgtcatgttgtgcctgcgatggagcatttgcgtcgtccggtcgatcagctggagatgattgttgataaaaatatttggccgatgccatcttatggagaccttctgtttgaggtatagtatagatcttttgttgtgaagatagaatagtggaaattgtaaaaattcttagattcttttaataaaatattaaggatgttcctattggattcaaaagaagtttatgttattctttattttgaaagaagataagaaacatcagacagtcccccgcctggtctgcctggcgggggactgtttgtcataagggactgtgactgcatggaaggcattctcttcggcatttgttgtgggagtgtcaagtagatacaggaaatctgggggaaatagatgaatagacatgaatttttaaaacagttggagcatgctttggaagccgagatgaatccggcaaaggtcagagagcatgtggactattaccgaagttatattgcagaggaagtcaaaaatggaaagtcagagaaggaagtgatggatcttctcggggatccgtgggtgatcgcaaggtctatcattgactctcctttaaatgaaacggaggatcaatacacatatgccgattatgaagaggcagagcaggaggcaccatttggaacaccggagataaagattaagaaaattaccggatggaagatagcggcagtttgtgtcgggattgtgctgattttggtgcttgtaatttcgttgctcactgggttgatcagtatgttggtacctgtgctggttcctcttcttgtgatttggattgtgctgcgaatcgtagaaaatcacaggcggtgagaagaatctgaaaatagtaaaaatggggaaaagtggggagaataagcctaaaatagcaaaataaaagaccgttgggggagccaacggtcttttgaggggagtataaataattaataaggggttgtaagaagtttccttcctacaagcagtagtataatataatacgtaataaaaagcaagcttaaattagaaaaaaagcaaaatattggcaaaatttacaaatgcaaaacctccggaagctgcatagttttttactgaacagggataataagaatgtaactattcacgagtgagcagcaattgcaggaggaaatttaaaatggcaaagaatgcgaaaacaacaaacaaagccaaaaacagtgaatcttattcatcttattctgatggatattccggaaacagcagcaaagcttcagatcgaatgacatcaaaaaatagcaacaagacatcagatcgaatgacatcaaaaaacagcagcaaagcatctaacaaaaataagaattcagagagcaacgaaaattcttacggaaattgcgattactaatcagcagaaaagagccagtgctgtaatacttcaaatgtcttaaataggaatacttttaaaagaatctgacagaaagcctttggtagtatgaaaataccgccggaggcttttttattgatgcgaaaatagttgtgcatccagacaagttgcggtatcataaaaatgaaatacagaacatcgggaggaagaagatggagaaactggaactgattgcaccatgccattttgggctggaagcagttttaaagagagaaatacaagatttaggatatgagattataaatgtagaagatggaagagtgacttttgccggggatgcaagtgcgatttgccgggcgaatgtgtttttgcggaccgcggagagagtgctgctgaaggttggaagtttcaaagcagtgacgtttgatgaattgttcgagcggaccaaggagatcccgtgggaaaaatatattccggaggatggaaaattttgggtggccaaggccgcttctgtaaagagtaaattgttcagtccttcagatattcagtctatcatgaaaaaggcgatggttaaccggatgaagcagtattatcatattgactggttcgaagagaatggggcgtcttatccggtgagggtatttttaatgaaagatatcgtgacggtaggaatcgacacttcgggagtttctcttcataagagaggatatcgtcagttgtccagcaaagcgccgattacagagacattggcagccgctttgattttgttgacaccgtggaaaaaagacaggatttttatagatccattctgtggaagtgggacatttccaattgaggcggcgatgatcgctgccaatatcgcaccggggatgaatcgctctttcacggcggaggagtggacaaacttgattccgcgaaaactctggtacgaggcggtggatgaggcgaatagcctgattgacgatgatattgaagtggatattcagggatatgatattgatggggaagttgtaaaagcggccagagagaatgcgagagaggcaggcgtagagcatttgattcattttcaggagcgggcagtaaaggatttaagacatccaaagaagtatggatttatcatcaccaaccctccatatggagagagacttgaggaaaagtctgcacttccggctctgtatagagaattcggtgagagctttaagaagctggacagctggtcggcatatatgattacgagttatgaggaaacggaacggtattttggaaggaaagcagacaagaaccgaaagatttacaatggaatgctaaagacgtacttttatcaattcctcggtccaaagccgccgagaaggaagaaatatctggaaatttagacagaacataaatagaaagtgaatgacaatgcaggatatggatgtgcaaagaaaaggatctgtatcctgcttgcaaaaagggacagggagaaagaacatggaaagaaagatcatatttgcgacaggaaaccaagataaaatgaaagaaatccggatgattttagagaatctcggaattccggtctcctcaatgaaagaggctgggattgatgtggatatcgtagaagatggaaccacatttgaagaaaatgcgatgatcaaggcagaagcgattgcaaaattgacagatgcgatcgtgctggcagatgattcgggattggaaattgattatttgaataaagaaccgggcatctattcggcgagatacgcgggaacagatacttcttatgagattaaaaataatcttttgctgcagcgtttggaaggagttccggatgagaagcgcacagcaagatttgtctgtgcaatcgcagcagtatttccagatggaagcaaagagactgtaagaggtactattgaggggcggattggatatgagattgccggagaacatggatttggatatgatccgattttttatcttccagaatacggatgtacaactgcagaactggacccggaaaagaagaatgaacttagccacaggggaaaggcactccgtttgatgagagagattatcgaacaaaaaatgcagcaggaagattagcatccaaagaaataaaaggttcgtgttccgaaaaaaggaaacactaaaataatattcgaagaaaatgacaggtgaaacaatgaagatactgatcgtgagcgatacgcatgggagacaccggaatctggaggaggttctggacagagagggaccgattgacatgctggtccatcttggagatgtagaggggggagaagactacatctgtgcactggcagactgtgagacacatattattgcgggaaataatgatttcttttcagatctgagcagggagcaggagttttttataggaaagtatagagtgtttatcacacatgggcactcttactatgtctctatgggaacgaaagaactgaaaaaagaggcaagaaggcgtggggtagatattgtaatgtatggacatactcatgtgccgcatctggaagtagatggaaatcttactgtgctcaatccaggaagtctttcttatccaaggcaggcagatcgccgtgcagggtatatgattatggaaatagatcacaatggaaaagcgcattttgagcaatgttttgtataaagtgccaaatgaataaaaaaataaaaaaaattagaaaaaagtgttgacttttgtttgttgctataatataataactcttgtcttaaggacagagacaaaaacaaaaacacaaaatagcaactacggggtgtggctcagcttggctagagcgcctggtttgggaccaggaggtcgcaggttcgaatcctgtcaccccgactccgcgggtgtagttcaatggtagaacactagccttccaagctagatacgtgggttcgattcccatcacccgctttcctagagccttagctgttaggaagaaaaaagaatgcgtgtttgtagctcagttggatagagcaacggccttctaagccgtgggtcaggggttcgaatcccttcaagcacgcttatggtgggtatggtgcagttggttagcgcgccagattgtggttctggatatcgtgggttcgagtcccactatccacccttattttttgcctatttttaggcgatgcatgatgggctatcgccaagcggtaaggcacaggactttgactcctgcattcgttggttcgaatccaactagcccagttgaagttttatattacggagcattagctcagtcggtagagcacttgacttttaatcaagttgtccggggttcgaatccccgatgcttcactagaacaagcctaggcttgttctttatttatgcggatgtggcggaactggcagacgcgctagacttaggatctagtgggagaccgtgcaggttcgattcctgtcatccgcagcctaaaaagcacttgaaagctgattttttattaagctttcaagtgcttttttatttttattcagtatcctgaaaataatttgatgatcagagaaaaatgttgatatacgtatacgtatatgatattatatacttgtagggaggtgagaggtgcgcatgcaaaacagtgaggaaaagaaaaacagaccgcaagataagtgggatgagaaagcagggttggttccgaagacatacaaagtcgataaggaagtagctgaagagttcaaagaagtttgtaaagaagtgggtgttgcgatgggcacacaacttacaaggatgatgaaagaatttattgaagaagtgaaaaaataaatagtagtgaggcaattgagaaaggataaggagagctcagatggaaaaattattagaacagattttgcaggaacgctatcaaaaaacaatcaaagaagcatcgaacaaagaaatctatacagcactttttattctcacgaaggagaagatgaaaggtgcaaagcgaaatgaaggaaagaagaagctttattatatttcagcagaatttttgattgggaaattgctgtcaaataacctgatcaacctcggattgtttgaggagacaaaagcagtgttagaaaagcatggacatcagatcacggagattgaggagatcgagcaggagccttctctcggaaatgggggattgggacgtcttgcagcatgttttttagattcgattgccacactcggattaaacggagacggtgttggtctgaactaccacgacgggctgttccgtcagacgtttgcagatcataagcagaaggaagagaaaaacccatggatcactgatcttagctggctgacaaagacagacgtgcagtttgaagtgccgtttaaagactttacgctgatttccacgatgtacgatatcgacgtgccgggatatagaaatggatgcaatcgtctccacttattcgatgtagatacggtagatgaatccattatccgggacggaatcgattttgataagacagatatccagagaaacctgacgctgttcctctatccggacgacagcgatgaggcaggacagttactccgtatctaccagcagtattttatggtgagcaatgccgcgcagctgatcttaaaagaggcagaggaacatggatatgacctttacagactgcatgagcatgtggcagtgcagatcaacgatacccatccgacaatggtgatcccagaactgattcgtcttctgatgcagagaggatttaatatggataccgccatcgatgttgtgagaaagacatgtgcatacacaaaccatacgatccttgcagaggctttggaaaaatggccggtcgcttatcttgaaaaagtagtgccgcatctgatgccgatcatccgggaactagatgcgcgtgtcagaagagattatcatgacgagcgtgtgtatatcatagatgagatggaccgtgtacatatggcacacatcgatattcattttggatatgcagtcaatggggttgcagcgcttcatacacagattttggaagagtctgaactgaaaccgttctatgatatttatccggaaaaattcaataataagacaaatgggattaccttccgaagatggctcgtgcactgtaatccaaaactggctacctatctgaaagaactgattggaccggaatatatggaagatgccaagcatttggagaaattgcttgcatacaaggatgacgagcaggtgcttcaaacattacgagagattaaaatgcattccaaacaaacgctggcagattatctgaagcggacacagcatgtggagattgacaccaattctgtatttgacattcagatcaaacgtctgcatgagtacaagagacagcagatgaatgcactctatgcaatctataaatacaaagagatcaaaaaagggaatcttccgaaacgtccgatcacaatgatcttcggggcaaaggcagcgccggcgtacacgatcgcaaaagatattatccatctgatcctctgtctgcagcagctgattgaaaatgatccggtcgtgagcaaatatatgaagattgtcatggtagagaattataacgtgacaaaggcagaaaaattgattccggcatgtgatatttctgagcagatttcccttgcatccaaggaagcatccggaactggaaatatgaagtttatgttaaacggagcagtcacacttggaacagaagacggggcaaatgtggagatccatgagcttgttggcgatgagaacatctacattttcggaaagaagtcggaggaagttatcaaactttatgaggatgcttcttattgctcgagagagatttatgaaagtgatgccacagtagaagaacttgtggacttcatcatcagcaaggagatgatccagattggagatccagtgaatcttggaagactctacaaagaaatcgtgtccaaagactggttcatggcgcttctggatgtcagagaatatattcagaagaaggaagaaatgctcgcagattatgaggatcagactgcgtgggcaaagaaagcgcttgtcaacatcgcaaaggcagggtatttctccgcagaccgtacgattgctgagtataacagagatatctggaaattatcataagaggaaacgaacatgagagaaacagggatattgatgcccgtatcttcgctcccgtcacgcacgggagtaggggaactgggaaaagaaacagaaaagtttattggatatctgagtgcatccggtgtgaaaatatggcagattcttccactcaatccggttggttacggaaattctccatatcagccatactcttcctgcgctggagatgagatctatatcagtctcgaaaaattgtgggaacagaagcttttaaaagaacttccggtgtcagagcttgcaggaagtacgagggtgcagtatgagcaggtgcggacgtggaaagaaacgtatctgcgggaggcatttcaggcatttatcgaaaaaggattggaccagacagaggagtatcagacgtttgctgcacagaaatgggtgcaggaatacggactgttccgtgcatttaagaaagcaaacggaggactctgctggaatgactggaagccggaacataaaaactggccggaacacaaaacggaagttgcgaaagcggtcagagaagaggcagactatcagatcttcttgcagtatctgttttactgccagtggatggaaatgaagaatgctgcaaatgcaaatgggatccgcattatgggggacatgccgttctatgtcggggtggattctgtcgatgtgtgggcgggaaagaaaaactttcttctcgacacagatggaagaccgatctttatcgcgggcgtgccgccggattatttcagcgcgaccggacagagatgggggaatccaatctatgactgggagtatctgaaaaagcagaactatcagttctgggtggatcggatcgggtatagcaatcggctgtttgacattatccgtatcgatcatttccgtgcgtttgatacattttggaaaattccggcatcctgtccgacagctgttgagggagagtggatcctggcgccgggatatgaagtgatcgacacccttctggagcagatcccgggagtgaacctggtggcggaagatctcggggatcttcggccggaggtgttggaattaaaggaacactatcacttaaaaggaatgaagatcctgatgttctccatcgacacttcgggaaaatatgcaaaagacagttttgacgatgtggaaaatatgatcatctacaccggaacccatgacaatgatacgctgatggaatggtatggtgatctgtctgtggcagagaaacgaaaagtgcgccgtttcctatcaagagaaggtattcggcagggatccgtgaaagagcgtctgctcacctacacgttaaagagcagggcggagtatgcgatcattccgcttgcggatattctcggaatgggaaaagaggcacatctgaatacgccaggaacggtggggagtccaaactgggagtggagaatgcctaaactggagaaaattgagagtggactgaaaaaatatagaaggcagtttattgacagataagaaagaattatttatatagaaaagagattaaattgcacaaggaggaattggctcgtttgggtcaattcctccttgtattttggtgtaattgttagaggtttttgaaagcagtctcttctgcattctttataacctggcggatgatatcattgcttccgtataatttctgaatgcgctctaattcatgggccatcgttgtgttgctgacggtgcggttgtcggtgttgacactgactttgacgcctgcatgtaagaaggtatcgagtgggtaattgttccagctgtcgatagcatgtgtctggagattgcttgtcgggcacatttcgattccgattcctctccgggcaatctcctgcatcaggtccggatcttgaatcagtgcaagaccatggccgatgcgggctgcgccgtattccatggctgtgcggacattttccacattgccagtctcaccagaatggatgacaaaaggaatctttcggtgtcttgcctcctcaaagagttcatgaaaaagaggatttggaaactttgactcatctccggcaaggtcaagcgcgcagacaccgtgtccgacatatttttccatactgtcaaggagctgcatattctgttctggcgcaaaatggcgcattgcacaggtgattacattataatcaattcctgtctcagattttcctttttccagtccccgcaggacactctcgatcacgtcttcacaggagaggccatcctgcgtggagagtgtaggggcaaaccgcacttcaatgtatttcatctggtctgcggcaagttcttttaagaatgtgtatgcagccagttctaagttcgcttttgtctgaagacagtgcagcgggagatcgaatttctttaaatactccgtgagggaagtgcaggaatcatctaccgaaagttcggaaaaatctggtgtacgatgcaaaaaatgggaaagtgtagtggcggaaagggatccgtccaggtgacaatgtaaatctgtttttttcaattcttttatattcaacataagtcctcctctatattcggtctgttagttgctttcagtataactgattgcgaagggggatacaaacattttcgtgttgacaacctttgaaaaattgtgataaagtgtggatagattcagaagaaatagtttttcggaatcaataagaagaggataggagctggaaagatgagcagtatttcttgcaaatagtaaaaactaaacaggcacaagaaggaaaaatagtctgccaagaatcgttggatgggcagattgtattttgtatgtttgtgcatttgcaggaaaatctttcgcagtcttattatgttacggcacaagctgtagcgcagagatataataacaagagaacataagtagtatgtccataaccgcagatgagcaggagtgggatgtttgaagatgcagaaagtttttgaagcgttctgtgtctttttttattacgcagaaactttcttcggaatactatggaatgtgacagagagattgtaaggaaggcaacgaactttgttggatttattaggagtagattttccatcagatgcacagcaaaaagatggaggggtaaagatgtcgcagatttgtgtgaatgacttaacattttattatgaaggaagctatgataatatttttgagcatgtttcgtttcggatcgatacggactggaaacttggtctgatcggaagaaacggaaggggaaagaccacgcttttaaaattattggaagggatttatgaataccgaggcacaatcacaagtgcagtgacttttgaatatttcccattttcggtagaaaatcaggggaagatgacgattgatattgtggaggaagtggatccgttgtatgaactttggaggatctgcagagaattatctttgatggataccgatgcagaagtgttgtaccgtccgtttgagacgctcagcaacggagagcagacaaaggtactgttggcagtactgtttgcaaaggagaatgcatttctgttaatagatgaaccgaccaatcatctggatctggatacaagggagattgtaatggcatatctgaaaaagaagaaaggatttcttttagtttcccatgatagatattttttggatggatgtgtggatcacatactggcaattaacaaagagggaattgaaatctgtcaggggaatttcacagtgtggcaggaaaataaagagcgaaaagatgcttatgaggctgatgaacaggagcgtttgaaaaaagagattggaaagcttacaaaggcggcgggaagaacagcaggatggtcggatcagatcgaaaaaagtaaggtcgggaatggtccggtagaccgtggatatatcggacatcaggcggcaaggatgatgaagcgggcgcttgtgatcgaacagcgggcgcagaaggcagtggaggagaagaaaaaactgttgaaaaatctggaaaaagcagaagaattaaaactgtttccactcagacatcacagagaaacggtaatcagggcagaaaatctggagctattttacggagaaaagaaggtgacaggtccactgaattttgaagtgaaaaatggggaacaggtcattctaagagggaaaaatggatgtggaaaatcaagtatgctaaagcggattctgggagaagctatttcttatcggggcaaattagaggttgcctccggcttgaaaatatcttatgtttctcaggatgcagagcagctttgtgggatgattgatgaatttgcaataaaagaaggagtggatccaacgcttttgaaagcgttgctgcgaaaactggatttttcccgggtacagtttgaaaaaccaatcgaatcttacagtggagggcagaaaaagaaagtactgcttgccaaaagtctctgtgagcaggcacatctctatatctgggatgaaccgttgaattttattgatctgttttccagaatacagatcgaagagctgatacagacctatcgcccgacgatgcttctggtggagcatgacagatttttcggggagaagatcggggcgagatatgtggaaatccagtgtacgcaggattgatcaaactgtgaggataccgtgcatcggcattgctattttcacggaaatgcgttatggtagaaaaaagataaaggaggtatttttcacatgcgtttaaaaggaaaagttgtactgatcacagcttctacaagaggaattggactggcttgtgcagtcagatgtgcaaaagaaggagcggttgtctatatggcagcgagaaatatggagcgtgcagaggcgcgtgcaaaggagttaaatgagcagggttatacagtgaagacggtatttaacgatgcttccgacaaggacagctatcgcacaatggtagaggaagtgatccgccaggaaggaaggatcgatgttcttgtcaataatttcggaacatccaatccgaagaaagatttggatattaaaagtacagaatacgaggaatttattggaacattggatatgaatctggcgagtgtatttcttccggtacaggcagtgatcccacatatggcaaagcagggcggtggaagtattatcaatatttcttccatcggaggacttcgtccggatatctcgcagattgcttatggaacgagcaaagcggcaattaattatatgacaaagttgatcgcagtgcaggcggcaagagataacattcgctgtaatgcagtgcttccgggaatgacggcaacagatgcggtcaaagataatctatcagatgattttcgtgagttcttcctaaaacatactccgatccgcaggatgggagaaccagaagaaattgcagcagcggttgtctattttgcgagtgatgatgcagcctatacaacagggcagatcatggatgtctctggaggatttgggatgcctacaccggtatacggagatatgatcgagcggacagatagaagataaagcaaggtgatttcagaaagaacggaaaataggttacaaatgtgcttataaaaggagacgaaaagagaaaaaatctttgtaatttttgatgcttactgctaaaataatataaagaaattacaaagaaatggagagaacgagtggataaagaatacaagattaagattggaaagattatttttcaagcagcgaagattgcagttggaagctgtggggcgatttctattgcaatggcactgaatctggagtatgcaacgacggcagggattattacactgctttcaattgtaccgacgaaatgggatacactgaagctttcgatgtatcgggtcattacttttttgttgtcggtgattgttgcgtggacctttttccagcatatggacagtgagtggctggcatacggattgtttatatttcttttagttgtgttctcagaatggacgggattgaaagcgacgatctcggtcaatgcagtaacgggaactcattttttgatgacacacgatttcagtctggaatttattctcaatgaatttcttcttgtactgattgggattggatttgcagcggtgttgaatctgtttcattataataatgcgcagcagagaagtcttgtggaagatatgcggtatgtagagagaaagcttcagcagattatggaagaactggagaaatatctgcggaacattccgatggataagaatgtgtgggatgatattatcgcgttggagaagaaattggaataccatgtggaagcggcatatgaataccagaacaatacatttcagtctcatccgggatattacattgactattttgaaatgcgcacaaagcaatgtaatgtgttgcataacctgcattatgagatgaaaaagattcgttatatcccgaaagaagcagatatcgttgcggattacatctcctatctgcgaccatttgtgacagagaaaaatgatcctactccacagattgagaaattacatgaattatttgatgaaattcattactatgaattgccaaagacaacggatgattttgagagtcgggcaaaattataccatattttgatggatctcgaagaatttctcatttttaatcgaagatttgtggaaggcttggatgagcgacagagaagaatttactgggaagaatagagtaagcacaaatgtaggtcaaaaagagaacagcatttctgtaaaataaaatatgaaaaaacttggggcacttaagatttcttcccacaatcttaagtgcctgtttctttgcgctagagaaatccatgtataaggaaagaaaactgcttgacttttggagaagagtttctcttataatagagaggacatactggattacgaaagagggtgtgtcctctctatctgtgtacaatcggaaataaatagaattggagcgataaactatggcgatcatacttgattatcaactgagagaacaaattccccatgatgttgaaaaatttcctattacatatttttgtgatgaacttgctgcgcttcccaactgggcaggacctttacattggcatcctgattttgaaattgccactgcggtaagtggtgtgctggactttcaagttgggcaacatcatgtgatactgaaagcaggtgacagtatattggttaatggaaatatcctacatggaatcaagcagttatctggcgatattcctgatccgatgccgaatattgttttttcgggtgctttaatcgcatctgaaactagtgatatttatcaaaaatatattcaacctgtcgcgaactgtgatgctttgccttttattgtgtttgatcaaaaaaatagttggcacaatgaagtgaatcagttggttaaaaatgtttacggtctgatgtctgaacaagggcaatgttacgaaatggctgtgcaacgcgaacttagcagtatatttcaatgcatcttttcgaattttgatgaattacctaaaacagaaaatacacgcatccaaatcaatactcaaatacgcatccaaaagatgctctcgtatatccgggagcattatgcagaagccgtcacactggaagagattgcccgatctgccaatatcagccgcagcgaagcgggacgttgctttaacgcatatgtaggatgttctccagtggatgcgttgattcagcatcgacttcaagttgcacacagacttataaaagatacaacgcggtctcttcaagaaatcagttattcctgtggttttaattcggtacactactttagccgtcagtttcggaaaacctatgggtatacaccgggacaatatcgtgctttgggtaaatagtgcttttatttgggtcttttgtgcctttgttttgattggatatgatgatataatgcaatccgactataatattacattcattttaaaggagcagttatgacaaaacaaaaaaactacaaaaaaacacttatagcttgctatctcggttttgttacccaagcgatatctgccaatttcactcctctgttatttttgacgtttaagaacacttatggaattggatttgaaaagattgcgctgattccgatggtattctatctcacacaattactgattgatcttgctgccacaaaatttgttgacaaaataggataccgtacctgtgtagtttcgtctcaggtgttatccgcagcagggcttgtttcaatggctattctgcctgaactgcttcctgtttcctttgcgggtattctgattgcagtcatcctttatgctatgggcagtggtcttattgaagtattagtaagtccgattgtggaagcttgtccttttgaaaacaaagatgggatgatgagtttactacactccttttattgttggggggctgtaggcgtgattttaggttccaccctcttttttacagtatttggtgtagaaaattggaagatacttacaatgatttgggcagtggtgccgttatataatgcattcaatttcatctcttgtccgatggaacgtttagtggaagatggaaagagtatgcggatcagccaattgcttagattgccgttgttctggttgatgatattgcttatggtatgttccggtgcatctgaagcgtctatggctcaatgggcatcttcgtttacagaatctgcgatgggtgtttctaaaacggttggtgatttggcggggccttgcctgtttgcggtatttatgggaatatcccgaatagtatatggaaaaatgagcgagaagctggacttgactaaaacaatgttggcatgtggtgtgttatgcgtaatatgctatttgatggcatctctgtcttcaacaccaataatcggattggcaggctgtgccctttgcggactttcggttggaattatgtggccgggaacaatcagtatttcgtcacagaagtgtccaagggggggcacggcaatgtttgcatttttagctctggcaggagatttaggcgctacgatcagtcctgcaatggtaggaaatatttctaatatgtttggcgggaatctcaaagtgggattgtttgctgcgactgcatttccactgatactgattgtcggattggctgtacagctgaaaggaaagaggaaagaaaaaacggcatagccaaaaaggcatgccgttttaaagtgaaaatttgagagataaaatcattggggcaccttccgaaaggaaagtgccccaatgattttatctctgttcaaatgtatgcggaaaatgggacttgaacccacacgtggtaacccacactagaacctgaatctagctcgtctgccattccgacatttccgctaacaaaatgtattctatcatatggaaaatgaaaaagcaagagaaaaataaaaaaatgttgacaaaattgattattgtgatatactttgaatatcaaaatattttaaaacaaaataataagaaagaaaaagtaaaacaatggtaggaagagtgacaggaaccggctcgtatgtgccggagaactattatgacaattatgatttagagaagtttgtggatacgagtgattcatggattcgggaacggaccgggatcacaagacgacatattatatcagaagaagagacaacggtcacgatggcatggaaagcttccgagagggcgctggaagatgcaaagatccatgcagaggaaattgatctgatcattgtagcgacgatttcttcgaatgtagtccttccgtgtaccgcatgtgaggtgcagaagaaacttggcgcgaaacatgcagtctgttttgatctaaatgcagcatgtacaggatttctatttgcttacaatactgcgcagacttatattgcagcgggacttgcaaaatgcgcacttgttataggaaccgagagtttgtctaagcttgtggactggacagacaggagtacttgtattttgttcggtgacggagcaggagccgctatacttcaggcagaagagggcgattttccgtcgatggtattccattcaaacggggcacagggggaggcgctctcctgtggcagtagagaagactatattcatatggatggacaggcggtatttaaatttgcggtccgacaagtgcctctatgtatcagtgaattgttagagaaggaggggcttgcaccggaagatatcgattattttatcctgcatcaggcgaatcagagaattgtagaggcagttgcaaggaggcttggacttacagtagaaaaatttccaatgaaccttcaggagtatggaaatacttcctcggcaagtattccaatcctgcttgctgagctgaagcaatcaggtgtactgaaaaaaggacagaagattgtgctggcagggtttggagcaggactttcctggggagccacattgattgagtggtaataaaaagggtaattcccggagaaatgaaagatgtttctgccggattacaaataaaatgaaaaaatgaaaaacgcatgcagaccatctgcatgtaagagaaaaaggagaatattcactatgttagaaaaggtaaaagaaattgtagcagattcattaggagcagatgtaagtacattgactgcagagtcatcttttaaggaagatctgggagcagattcccttgacttatttgagatggttatggcttttgaggaagaatttggaagagagattccgacagaggatttagaacagctgacaacaatcggagcagttgttgcatacttagagaaataaaaaagacaggaaaaggaaaggtgtccgtatgagaacagatgtgacaaaactacttgaaattgaatatccgattcttcagggaggaatggcatgggttgcagagcatcatcttgcagccgctgtatccgaagccggaggtctgggattgatcggagcagcgagcgcgccgggagaatgggtgcgggagcagatccggaaggtgaaagagcgaacagagaagccgtttggagtcaacattatgctgatgagtccatatgccgatgaagtagcgaaagtcgtggcggaagaaggtgtgaaggttgtgacgaccggcgcaggaaatccggaaaaatatatgaaactgtggaaggatgcgggcatcaaagttattccagttgtggcatccgtcgcgttggcaaagagaatggaacggtgcggcgcagatgcggttgtggcagaaggttctgaggcggggggacatatcggagaaaacacgacgatggttctcgttcctcagattgccgatgcagtatccatcccagtcattgcagcgggaggaattgcagatgggcgcggggttgcagcatccttgatgctgggggcatccgcagtgcaggttggcacacactttgtcgtgacaaaggagtcggtggtgcacgagaattataagaaatgtattatcaaagcgaaagatattgattcaaaagtaacaggaagaagtaccggacatccaatccgtgtactgagaaatcagatgacaaaagaataccttcggctggaaaaagaaggagcttcttttgaagaattagaaaagcttacgcttggagcgctgagaaaggcagtcgtggaaggtgatgtagtcaatggcagtctgatggcaggattaagtgcaggtcttgtcaaagaggaattcagctgtcgggaattgattcaaaaactgatgagcgaggcggaagcgtgtctgaaaggagcgaagctttatgagtaaaatagcatttattttcccgggacagggtgcacagaagactggtatgggaaaagatttttatgaacaaagccagagggcagcagaaatttatgatgctgcatctaagaggctaaaagaagaaatggaaatagacatcagaactctttgttttgatgagaatgataaattagaccagacagcttacacacaggcagcacttgtgaccacttgtcttgcgatggcaaggaccttggaagaaaagggtgttcgtgcagatgtaacggcgggtttaagtctaggggaatactgtgctatcgcagtagcaggcggaatgtctgatctggacgcagtctgggcagtacgaaaaagaggagtccttatggaagaggcagtgccgacgggagttggtgcaatggcagcagttctaggactttctgcagagcagatcgagaaagtaacagaggagatcaagggagtgacggtcgcaaactataattgcccgggacaagtggtgatcaccggggaaacggacagtgtggatgcggcaaaagaaaagctattggagtgtggtgccaagagagtacttccgctaaatgtgagtggtccatttcattcgccgatgttaaaagaggcaggagaaaaactgtccgaggtgcttgaccagatccacttccatgagctggaacttccatatgtgacaaatgtgacagcagaaccgatcacagatatttgtaagacaaaagaactgctgaaggagcaagtggcggcctctgtcagatggcagcagagtatggagcggatgatcgaagatggtgtagatacttttatagagattggtccgggaaagacactggcaggctttttaaagaagatcaatcgaacggtcacggttatgaacattagttgtattgaagatgtggataaagtagcttcggcagtaaatctatgtggagaactttaatgggaagaaaagcgcctggcagaatctgacagaaaggaagcagagaggatagcattctctggtacgaaaaaagatggatagaaaagaagaacaaaatcaggaaagaaatggacagaaagaaatttttgcgggaaaagttgcggttgtgactggagcttctcgtgggattggacgtgcaatcgctctggaacttgcccgaaaaggagcaatggttgtgatcaactataacggatcggaagagcgagcgcaggaagtacagaagtgtatcgaagaagaaggaaatgaagcagccatcatgcagtgcgatgtatctgactttcaggcatgcgaagcatttttcaaaaaggtgatcgaacagtttggaaggctggatattcttgtaaataatgcgggaattacgaaagatggattgttgatgaagctgtctgaggatgattttgacagtgtggtggatacaaatctgaaaggaagctttcactgtatgagatttgcggcaagacagatgatccggcagagaagtggaaggattatcaatctgtcctctgtttccggtgtaatgggaaatgcagggcagacaaattattctgcgtcaaaagcaggcgtgattgggctgacaaaagcggcagcgcgggagctggcggcaaaaaatattacagtgaatgcaattgcacctggatttatttcaacagatatgacagaaaaactttccgatcgcgtaagagaaacggtggtgacacagattccgatggggcatttcgggacagtggaagatattgcacatgcggcagtatttcttgctacagaagaagcggcatatattaccgggcaggtactctgtgtggacggcggaatggcaatgtagaaaatgagggagaacgacatgaaaagaagagtagttgtgacaggattaggagcagtgactccgatcggcaataatgtggaaacattctggaatggaatcaaagaggggaaagtcgggatcgggccgatcacaaagtttgatacagctgagtataaagtaaagattgcggcggaagtgaaagggttttccgcaaaagaacatatggattttaaagcagcaaaacgaatggaattattttcccagtatgcagtggcggcggcaaaagaggcctgtgccgatgccggacttgagatggaaaaagaggatccgtatcgggtaggagttatcgtaggatctgggatcggaagtcttgccacagtcgagaaagagtatgaaaagatactggaaaaagggccggcaagagtcaatccgctcatggtgccattgatgatctccaatatggcagcaggaaacgtgtcgattcacactggagctaagggaaaatgtacaagtgttgttacagcctgtgcatctggaaccaattcgattggagatgcgttccgggcaatccagtatggcgatgcagatgtgatgtttgcaggtggaagtgagagctgcatctgtccgaccggagttgcagggtttacggcattgactgcattgacaacaacagaagatccacttcgtgcctccatcccgtttgacaaggaacggagcggattcgtactcggagaaggagcgggcattgttgtgcttgaagaattagaacacgcaaaggcaagaggagcgagaatctacgcagaagtcatcggatatggctgtactgccgatgcatttcatatcacttctccggcggaagatggaagcggcgcccaaaaggcaatgcagcttgcgatggaggaggcaggaattgcgccggaagaggtggattatatcaatgcacatggaacaagcacccaccacaatgacttgtttgaaacaagggcagtgatcgctgcatttggagaggcagcacataaacttaagatcaattctacaaaatcgatgatcggtcatctgctcggagcggcaggcgctgtggaatttattacttgtgtcaaatccatagaagaagggtttatccatcagactgtgggaactacggaggcagatcaagagtgcacacttgattatgtgctcggtgcgcctgtcagacaggaagtgtgctgtgcgatgagtaactcgcttggatttggcggacataatgcaacacttctgatcagaaagtatcattagtacgattggattcgctttcagaaagtcattgggaaaagaggtacaagaaatggaaacagaacagttaatacagctgattcaggcggtgtctgtatcggaactgacacagtttaagtatgaagaaaagggagtgaagctctctcttagaaaaggagaaagaaggtctggatgccataccggtataactgcagaaggagatatggaaagtcagatcagtttctctggaaatgcaacttccgggaagaaaatgttagaggaagaggcaaacagattggattcgcagaaagaaaagaagcaagagaatctggaacagaactgcgagggagttcaggagaaaccagaaggaacgattgtgacctcaccgcttgtcggaacattttatgaagctccggcagagggagaagcgccttatgtgaaagtgggcgatattgttcagaaagggcagatgcttgcaatcgtggaggcgatgaagctgatgaatgacattgaaagcgattttgcaggtactgtggcagaaatctatgtggcaaatggagaggcggtttcttacggacaaccgttgtttcgaattgtagaagggaagtagagagatgaaacgattgaatgtaaaggaaatagaagcgattattccacatcgccatccatttcttctgattgattacatagaagattatgagccggggaaatatgcggtcggatataaatgtgtgagttatcgggaggaattttttaaaggacatttcccacaagaaccggtgatgccgggggtattgatcgtggaggcactggcgcaggtcggagctgtagccattttgagcatggaggaaaatcaaggcaaaacagcttatttcggaggaatccagaaatgtcgctttcgtgagaaagtgattccgggagatcaattgaaactggaaacaaaaatcatcagacagaaaggaccgcttggaattggtgaggcagtcgcaagtgtgaatgggaaaatcgcagcgactgcagagctgacgtttatggtaggataggaaaaagggtggaactatgataaagaaagtattagtcgcgaaccgcggagaaatcgcggtgcgtattataagggcatgtcgggagatgggaattgagacagttgcagtgtattcgcaggcagatgaggaggcgcttcatacacagcttgcagatgaagcaatctgtatcggaccggcacaatcttcggaaagctatctgaatatggagcagatcatcagtgccaccttagtatccggggcagatgccattcatccaggatttggatttttatcggagaacagtaaatttgtggaactgtgtgagaaatgcaacattacgtttatcggtccttcctctgaagtgattcaaaaaatggggaataaagcacaggctcggagaacaatgatagaagcgggtgttccggtcattccgggaagtaaggaagcagtaagagacgtttcacatggcgctgaaattgcagaggagatcggttatccggtaatgatcaaggcggcgcttggaggcggcggcaagggaatgcgtgtggcagaaacccgcgagacatttgcggcaagctttcagacggctcagaaagaagcacagatggcattcggagatggaacgatgtatcttgagcgatttgtgagaaatccacgtcatattgaatttcagattctggcagattgttacgggaacgcaatccatttgggagagcgtgactgttcgattcagagaaatcatcagaagatgattgaggagtcaccgtctgcggtgattgatgaggaacttcgcagtagaatgggacaggcggcagtgcaggcggcaaaggcggcaggctataccaatgcaggaaccattgaatttcttctggaaagagatggtcagttctattttatggagatgaatacgcggattcaggtggagcacccggtgacagagtgggtgaccggaatcgatctgatccaggaacagatacggattgcatccggactgcctctatcttaccggcaggaggacatcaagctttccgggcatgcgattgagtgcaggatcaatgcggaaaatccggacaaaaatttccgcccatctccgggtacgatcacagatctttatctgccgggcggaaagggtgtgcggattgacacggcgatttacagcggatatacagttccggcatattatgattctatgctggcgaagctgatcgtacatgcagatacaagagaacaggcgatcagcaaaatgcgtactgcgcttggcgaagtgatcatcgaaggaattgacacgaatattgattatcagtatgaaattatgaatcatccggattatcaatccggaaagattgatattgaatttatctctaaatggcagaggtaggagtgaaaagacatgaagctgaaaaatatgtttaagaaaaccggtggaaagaattatatttccctgacggaaggaagaaagccggaagtaccggaagggcttttgcgaaaatgtaataactgtaaagctgcaatcatcgcggaggatgtcagaagaggatattatatctgtccaaagtgtcatgcgtactttcgtatggatgcatggagaagaattgagacaatcgtagatccggatagttttgaagtgtgggaggaagcaattttagatggaaatcccatgggatatccggggtatgaagaaaaattacagaatgtgcgggaaaagaccggacttgatgaggcagttgtgatcggaaaggcagagattgaaggaaggaaagttgtacttggagtctgtgacggaagatttctcatggcaagtatgggggaggctgtcggcgaaaagatcgcgggggcagtagagcgtgcgacaaaagagaaacttccagtcattctctttgcctgctccggtggggcgagaatgcaggaagggattttttctttaatgcagatggcaaagacggcagcggcattaaaacgtcacagtgatgcgggacatctgtatatctcggtgcttaccgatccgacgaccggaggcgtaaccgcaagctttgcgatgcttggggatttgattttagcagagccaaatgcgctgatcggttttgcgggtcctcgtgttattgaacagacgatcggacagaaacttccgaagggctttcagcgggccgagtttcttttagagcatggcttcattgatcagattgtagagcgggaaaagctgcgggaaaccttgggaaaaatcttgaaattacatccgggccaaccagatcgtactgcgcagactaaagaagaggagatgcagaacaaaaagcaaagcgagaaagaagaggagaaactgtgtcagatacgggaaatgacaccgtgggagcgtgtacaggtttccagaaaaaaagatcgcccggttggatctgactacatcagggagttgtttgatgattttgtggaactgcatggagaccgtctttttggagacgacaaggcggttgtcggcgggattgcacagttctgtggggaaccagtcacggtcatcgcacaggaaaaagggacaacgacaaaagaaaatattgcgaggaattttggaatgccgtcaccggaggggtatcgaaaggcattgcgcctgatgaagcaggcggaaaaatttcatcgtccggttctctgttttgtcgatacaccgggggcattttgcggcctggaggcagaagagcgaggacagggagaggcaattgcaagaaatatttatgagatgtctgcgctcaaagttccaatcctctctgtgatcatcggggagggtggaagcggcggtgcacttgcactggcgacagcagatgaggtgtggatgctggaaaattcaatctactcgatcttatcaccggaagggtttgcatcaattttgtggaaagacagtaagcgggcaaaagaagccgcggaagttatgagactgactgcaaaagatttgtatgaggcaggaattgtagaacaggtttttgcagaaccggaagcattcacaagtgagacatttgccccggtgacagagaaacttcgagagcatatcagaagatttttgaaaacgtatcagggaatggaagagtcagagcgcacagaaagaagatatcagagattccggagactgtaagagaaatacacatcgaaaatgagtaagcaaagagataggtatcaggtatgaagttagaagaaaaaggattacgagttggggaaaagcagttaaaagtcccgatcatccagggaggaatgggagtcgggatcagtcttggaagactggccgggagcgtggcaaaagaaggtgcggttggtatcatttcagcagcgcagatagggtatcaggagcccgattttgacacagatgcaagaaaggcaaatttgcgtgcaattggaaaagagatggagaaagcaagggcaatctcgccggatgggattattggatttaacatcatggtagcgatgcgccattatgaagactatgtccgggaggctgtctgcgccggaacagatctgatcatttcgggtgcaggccttccgacagaacttccgaaatatgtggcagggagcagcgtacagattgcaccgattgtctctacggaaaaatcagcgaaagtcattctgaaatattgggataagaaatatcagcgaacggcagatgtgcttgtgatcgaaggaccgtctgccggagggcatctcggatttacaaaagaacagattgcatattatgatgtagaaacttatgccggggaaatcaaaaagatcaagaatgttgtccgagaatacgaagagcgctatggaaagaagattcctctgtttttggcaggtggaattgagaatcacagtgatgtaaatcgggcactttcacttggtatggatggtgtacaggtggcgacaagatttgtgacaacaaaagaatgtgatgccgatcaacgatataaagaagcatatttaaatgcaacagaagaggatatcgttattgtgaaaagtccggtgggaatgccgggacgtgcgattttaaactcgtttatgaagaaagtgatagcgggggagcagatccctcacagtccgtgtcatggatgtattaaaaattgcagaccgcaggagattccttattgtattacggatgcgctgatcgcggcggcaaagggcgatattgaacatgcgctgctgttttgtggagcatatgcttaccgggcacaaaaaatagaaaccgtgaaagaagtcattgcttctttgatgaatccgtgtgtataatatcaacataagaatgtcggcagcagacaaaaacaagatgttggtaaaggagccggagacagtgaatacatatgaaacaatcaatcatgttctcgttcatttgtttaatgaaatatgggagctggaagaaaaggcgatcatcacagaagaatacaaagatatcagtaacaatgacatgcatatcatcgaagcaatcgggctgggggaaggaagtacgatgtctgtgattgcaaaaaaactgaatattaccgcaggatcacttacgacatcgatgaacagtcttgtgaataagaaatatgcggtcagagagcggagtgagcaggataggcgtgtcgttcatatccgtctgaccaaaaagggagagcgggcattttatcaccatcaggaattccaccggaagatgacagaggcagtgatcaattgtctcggggaagaggaactgccggtgcttttaaagacactggataaattgtcggaattttttagagaatatccgattgagcagggagagaaaaaggaataggaggaatgctcgtggaagaggaaagcagacgcgagatagagcggttacagcagatgatcgatgaaagtcaaaaaattgtatttttcggcggcgcaggggtatctacggagagtgggattcctgatttccgaagtgcagacgggctgtatcagcaaaattataagtataccccggagcaggttgtgagccatagtttctttgtgcgcaatccggaggcattttatgaattttataaggagaaaatgatgtttctggaggcgaagccgaatccagcccacgaaaagctggcacagttggagcatgtggggaaactgactgcggtgatcacgcagaatatcgatggtttgcaccagaaagcggggagtgaacaggtgctggaactgcatggaagcattcatagaaattactgtcagaaatgtggaaagttctatgacgcagccaccgtgaaggaagcagaaggaattccgagatgtatctgtggaggaatcattaagccggatgttgttctgtatgaggagggcttggacagcagtgtgatccggcgtgcgatccgggcgatcagcgaggcagatatgctgatcatcgggggaacatcccttgttgtttatccggcagctggatttattgattatttccgtggaaaatatcttgtggtcattaataaaagtgagacagcgagaactgtggaggcagatctttgtatccgcaggccaatcggggaagtatttgcacagattcagctgtaaattgagatgattcatctggcggggaatatctccattctttttcatataagaatgtaacataagaaggatttggaattttgccaaatccttcttataattttgtgtcatatttttctagagtgcaaagattattgtggttcggtcatcgtaaatggattaagcagcacatctgcttcacttgggcatagaagccctttttcgatgacgagtttgcgaaccggaattccagtctttaaagattctttcgcaatctcagcagaaggtttgtaaccgatcgttgggcataatgcagtggagattccaacacttgcatcgactaattcttcgcagtgcttctcatttgcggtaattccaaggatacagttatctgtcagagtctgtactgctgatgtcaaggtttcaatcgattcaaataaattatagaagacgaccggttcgaaggcatttaattctaactgtcccgcttccgcagccatcgtgatcgtgcagtcattaccgataatgttaaatgcgacctgagatacgacttccggaatgactggattgatctttccaggcataatcgaggaaccgttctgttttggcgggagcgtgatttcggcaaaaccagtgcgtggaccactgctcagaaggcgaaggtcattacaaagtttggataagttgacggcacaagtttttaaagaggaagagaccgtcacaaatccgtccagattctgtgtcgcatcaaacaagtcatctgcggatacgaacggaagtccagtcagttctgcaattttcgggcagatgtgctgtaaataggagtggctgacgttgattgcagttccaatggcagttccccccatattcaggcggtacatttctttctgagcgttttccagacgatggatatctctttggatcacggaagcataagcatggaaagactgaccgagtcgcatcggcacagcatcctgaagctgtgtacgtcccatttttaaaatgtggtcaaattgttttgatttctctaacagtgcattcaaaagccgttccagttctctgaaaagaggaagaagcagttttaatacagttagttttccggcgcttggaatgatatcatttgtagactgagccatattgacgtggtcattaggatgtacatgctgataggaaccttttgttccgccaagtaattcgtcagcacgattagcaataacttcgttagcattcatatttgcagaagttccggcaccaccctgaatggcatctacgatgaactgatcaaaaagtttcccctctaaaatttcgttgcaggcagtgcagatcgcttcggacacttcgctggaaagttcgcccgcattttcatttgtaagtgcggcagccttctttaaaatgacgatgcttttgataaactccggatggagtggtctgcttgtaatgggaaaattgtgcttggcgcgaagggactgtactccataatacgcatcagcagggacttctaaaatacctatagaatcagcttctaatcttgttttcatagtttctttcctccgtaatctctttcaaaatgctgtctgctggtaacatatacttacagacaaatttcttctgacttatatataacacgggcagagaaaggagaaaaggagaagagaaaaagtgtgaaaagaaagaaaaaataaagtataagtagttagaaatgttaatatgaaacgataaaaactttatttttttaagaaagatttaggggaaagtttttggcaaaattagtagaaaggattgtaattctttgagaagttctctataatggcaggaaggaggaaggatgatggatcagatagacagagagatcatgaatatgctgcagaagaatgcgagaataccactgaaggcaatcgcacaggaagtacacttgtctattcctgcagtttcagcgcgggtagagcgattggagcgggagaatgtcatctgtggatatacaatgatcgcagatccggtgaagatgggataccatattactgcatttatcaatatggagttaaaaccggaacaaaaggatggattttgcaaatttatccggggggttcggaatgtggcagagtgcaatcatattacaggagcctactctatgttgatcaaagtactgttcccaagtaccatggaattagatcggtttgttggaacgcttcagaaatatggaaagacacagacacagatcgtattttcttcgattgtaagtgcaaggagtataggtccgcttgagcaggaggagtcgaagaaaaaaggatagtcttcagaaggaatagaaaaagataagaatatataaggcgtctgtaatagaagaggcagttacaaaatggaaaaaatcattttgtaactgcctttttcagaaaatctagttctattttccgcaaatactgcatccaagcgcacatccggttggagttccggcgcatccgcccatagctgtttcccgcagttcgaatggaaggctttgcccgacacggtgcatagcttctgccatttcgtcaaatggaatcggatgtttcacaccacttaatgcgagctctgcacaggtgattgcatttgcgacaccgatcgcattccggctttggcatggggattctacaagacctgcaattgggtcgcagacgagtccgagtagattggaaagtgcaaagcttgcagcgtgaagacacatctcaggagttccccccatgatttcaacgacagcgctggcagccattgcagaggccgcgcctacttctgcctgacatccggcttccgcaccggagacagaggcatttcgcattaagatataaccaatcgcgcttgcatttagaagaccgtcgtaaatgctgttatccggaagggcatgtacttcctccagagcgagcaggacacctggcaacacgcctgaagaaccggcagttggtgctgcaacgatcagtcccatggaagcattgacttcaagaacagccatactgtaagcaattgcttttgatagcatagaaccacatacactgtttggggaggaggaatgatctgctactttcttcgcttctccgccgaggagaccgccgatggagcggactggttcttttaaaggcttatgaacggaatctttcatgatggcaagcaccgtctccagttttgcctgaatttcttcggcagagagactgcccatagtaatctcgcgctgcttcatggcagaagagattgatatcttttctttttgacataaatctaataaatcttgtcctgaataaaaatccataatgtctcctcctacatctgaatgagcatcagatcagatacatgctcatgtgttttgattttctctaatacagacgatggaatcgtctcatcggattctacaacggtaaatgcattggcgcctttatcctcgcggaagagacgcataaatgcgatatttacattttcttcgctcagacactgggtaatgtgggctactacgccaggtttgtctgtctgactgacgatgagggtgctgtattctcccgtgaactctacatcgatctggttgatccggacaattttcatcttgccccctccgatcgattcgccgcggatcgataaggtatgcccggtcacgcctataagatcaatgtcggcagtgtttgggtgattcgtcatcgttttctcatcaatgatatattcgtattccacacctcgctcggttgcaatggaaaacgcatcacggatccgttcatcatcggtagaaaaaccgagaattccccccagcagcgcacggtcggttccatgtccgtggtaagttttggcgaaagagccataaagggtgaacgttacttttttcacttcttccggaaacatttttcttgcgagaagtgcaatcgatacggcgccagccgtgtgtgaactggaaggaccgatcatgttagggccgatcacatcaaatatacttaaaaagttcataaactatcctcctgagagattttttgcataactacttatagtatagcataaaaggagcaggaaaataaagaaccgggagcagaatttgttgagagattacgaggaacctttccaaggatagaaaagaggatcagattccaaaagtgtaaaaagagagtgaaaaaatcgtcggatagcacaaaaaggatatggcaaaataaccaaaataggatagctaaaactatggagaatatacaaaaagacgaagcggaagaggaaattgattgacagtatcatcacatgtatatagaatgtaaatatgtttatagagtcggatgataaattcgagagagactacacgggaaaccgatgtggcgccgaaggggaaaggagtaccaaagctctcaggcaaaaggattgaatttggacgagctctctggagaacgcgagtatgcgtaccgaagaagaaacttatcaatacggaagttaagaatgataattgaagtaaaacataaggaaactttcaggttcgaggacagagatgaacaaaagtataggcgtgctttgtttgtctgtgtctttttttgttcgcattttccgggaacaggaactgcaaaagaaagaggaggcaaaagaatggcagtaatatcagggttagggttgttgttagtcacactggcggcattttcgctgtttagtatgaaggcaccgaaaggatcagaggcgatgtccggaatggcaagtgcagcggtggctacatttcttgtggaggcagtacacagatatatttcgggtgacttactgggagtcagctttctaggtgaagtaggaagtacagccggaagcttaggtggagttgcagcagcgatcatggtgccgatcatgatgggagtaaatccggtatacgcagttgttgcgggggcagcgctgggaggatatggaattttaccgggatttattgcaggatatgtagttggatttgttgcaccgcttcttgagaaatatttaccgacagggctggatgtgattgtcggagcgctctgtgtggcaccgctggcaagaggaattgcatatatttccgatccagttgtaaatgcagcgatggaacacataggatctatgatcacagcagcgacagatcagtcaccagtattgatgggatttatgctcggaggcttgatgaaaatgatctgtacctcaccgcttagttctatggcgttgacggcgatgcttggactgaccggacttccgatgggaattgcatgtatcgcatgtgtcggtggggcatttacaaacggaatgattttcaaaatgctcaaattaggggataagagcagtacgatcgcagttatggtagagccattgacacaggctcacattgtgacgaaacacccgatcccaatttatggatctaatttctttggtggaggaattgcaggtattggagcgtccctacttggaattgtatgtaatgcgccgggaacagcatcaccgattccgggattgatcgcaccatttgcgttcaattcaccggtaaaagtaatccttgcattagccatcggtgtagcaggcgggaccttggcaggatatgtgggaggacatattttcaaaaagcattacgcagaatctgacgcacacatggaaggatagggaatcggagagataccgaagagaagtaatccgtacagaacgagcaggcctattttttgcaatccgtaaacatagggagaaaagtggcataaagtaaaaagaggcaaatatgtaaaaagaagaaaccgcgaaacctctggggagaggcgacgatgtttcttctttttgtattgcacaaaatatgaaaaagatgtttgttgtactataaaatactaagagagatcaaataattcaatgctgcggaaaaggatccctttcatctgtgcgatcgcaatcccgtaatttgtgattgggacattctgatcttcggcacaggcaatccggtatttcatctcgcggtcattgagcatacagccaccacagtggatgatcagcttatatggggatagatcagctggaaattctgtgccgcttgtaaagtgaaattccggttcacagtttgtatagctacgaatcaggcgtggaagtttcacagtgccgatatcttcgcattgccgatggtgcgtgcatccctcggaaatcagtattttgtctccgtcagaaatagaatccaaagtgtgggcgccgtttacgacagtggaaagattccctttatgccttgcaaacaggattgaaaaggaagtaagagggatatcttttggcgtctgtcggtctacctgagcaaaagcctgactgtcggtgatgaccattcgtggtttgacagacagttcgtctaatgtctggcgaagctccgtatcctgtacgcagagcacacgcccatgatgatccaaaatatcccggatggtctgctgctgtggaaggatcagacgtccctttggtgcagaggcatcgattggaatcacgagaatcacaagatccatgggggagagcagatcgctgacgatcggaagttttgtttcttcgcttggctggattgcgccgagcaggtctttgagtgcagaaatctgaaatccggaggcagcactgatagaaatagctgatccgtttttcgaggtgtctgtagtcgtatctggcatctgggattcgctagccgggcaaagatcacatttattgaatgcgatgacatagggaatctgttttttctggatctgttccagaagagcgagatcttcctccgtcatcccgatggtgccatccacaacaaggatggcaatatcggtcttatttaacatttggtaggtcttctgaacgcgcagctctccgagtggtccgtggtcatcaagtcccggagtgtcgatgagtacgacaggaccaagcgggagaagctccatggattttaataccggatccgttgttgtccctttgatgtcggagacgattgcgagattctgaccggtcagtgcgttgatcaggctggattttccggcatttcgtttcccgaagattccgatatgtaggcgttcagaggaaggggttgcatttaaactcatgtcagttacagtcctttccatgataagtagagtatcgtgttacaaagaaaaagtatcagggaccaaagcggtacgtttgagagatgttagaaacggaaatctctccgattttcttcttcaatcgcgcgtagatggtcaataacgattgcgcgtacgttctcatttggaatctgctccagttcttttaaaatcagtttttctccgacttcttttgtcgcaggagaagcatagtctgtcagatattctttcagtgtcatcagtgcatttggctggcagcagttctggatctgaccggatttgcaaagagacatgaaacggtcgccggtgcggccttcccggtagcaggcagtacagaagcttgggatgtatcccatttccatcagccacttgacaatatcatcgagtgatcttgtatcactgaggtcaaactgtgcagagttttcttcttcaggttccggctctgcatatccgcctacacttgtcttggagccgccactgatctgggagattccaaggtgcagaacacgctcgcgggatttctgactctcgcgggtagatacgatcatgccggtataaggcactgcaatgcggatgcatgccacaagttttgcaaaaatatcatcgttgatcccgttgtcaaaatcatttgtgtcaatatcgtcggctggacataagcgcggcacactgatcgtatgaggacccacaccgtatgcagcttccagatgttctgcatgcatcagaagtcctgcaaattcatagcggtatttgtcaagaccgaacagcacaccgattccgacatcatcaatacctgcttccattgcacggtccatcgcggtagtatggtagtcatagtcgtgttttggtccggtcggatgcagctccagatagctttttttatgataggtttcctggaataaaatgtaagttccaattcctgctgccttcagtttccgataattttctaccgttgttgccgcaatattgacattgacacggcggatttctccgtttttatgtttgatgctgtagatggtgtcaatacattcgaggatatattcgatcggattgttcacaggatcttccccggcctccagcgccagacgtttgtgaccgagatcctggagcgcgatcacttcctgacggacttcttcctgcgtcagtttctttcttgcgatatgcttgttctttaaatggtacggacagtaagtacatccgttgacacagtagttggacagatagagcggcgcaaacatgacgatacggtttccgtagaaatcttttttgatctgttctgcaagtgcataaatttcttcatttttctcttcgatatcacagtcaagaagaacggcagcttcccggtgggagagcccttttcgttctttggcttttgcaatgatctggtcgatcagttccacgttatgtttgtttgcctctgcataggagagggtttccagaatttcctcgtggttgataaattcctctggattttttgatctgacatcgtacatggtgatgttcctcctcttgaatatgatagttttggcatgagttcatgcaattagtttactggtgggattgtttcggtattcaaagaatctccgcgggctacgacaacatggtagccgattttctccatccgcttttccatacagtgccggcattcagcagcttcatctcctgtacagattttgttgtcgtagagcgcataatcttttcgcacatcggttggagaaaggtttggcataacgacatttgctccggcaagaataccaagctctcttccgtttggatcgatcgttccaagcgcagttgtcgaaggcagcagaagctttggaatcatcagtcgcagaagtccgagcataaataaggtcagttccagcgtgccggccggctgtgcggcaaatggggtatcatggtgcggaataaaaggtccgattccgaccatatgtggattcagttgttggataaacagcatatcttctgcgagatgctcggcagtctggtaaggagagccgaccataaatccggttccggtctgatagccgatttccttcagatcatacagacagcgttgccggtgggcggcggtcagtgccggtggatgcagtttgccatagtgggtggaattatatgtttcgtgccgcagaagataacgatccgccccagcatcaaaaaatgcctgataactttctcgttctttttcgccgatggagagtgtgatagcacagtccggaaagtctgttttaatcttctcgatcagagagatgattttttgatctgtaaaccagccatcttctccgccttgaaggacaaaggtgcgaaagcccagttcatatccggtacggcagcagttttggatatctgtttcactcagtcggtagcgacacgcatttaggttgcttttccggatgccgcagtagatgcagtcatttttgcaatagtttgtaaattcgattagaccgcggatatacacatcatgtccataatgttggtgcctgacttcgcgtgcctgtgaaaatagatattcgctcacatcgcgggtgcggttttcaatcagaaacatccactcttctttcgagaggagatgggtgtcacgcagttgatcgatcaaggtgatcaaagtttgttctgctattttattcatagaaaatactgcctttcttaaagttccgcggaagttgtctttgcataaattgtcttgctggaaataccgggaagcattccgattttcccagataaggcgctgatcacgttgttgggtgcatccatagcaatgctgatgatggagaggcttttctcacggtaagggattcccattcttccgatgatatagttgccatactggctgagcaggctgttgagctgttcgacagaatcgctgttttccacgacaataccgatcagagcgattctggtaggtgtttgttccataaagacctcctgtaattcttatgtggtaatcgtatcatatcgggatagctgaggaagagtgatgtgatctttttagaaaaaaagactctgcgagaaggcaaagtctgatgagtgttttccatatggtatcatgcacagtttcaggaaggataccgtatacggtcagtcattttgttgtcctcttcgccttttcactcaggaattcctttatgatcagtacgtttttttcagtataacatgtggaagagcggacggcaataaaagtttattgtttgacgaacttgtgtgaaaaggggtttacgcggggaaaagaattcgttacaataaagaagagtcggaaaaagactggagagccggggagaggccggcaaaaatcagagaaaagaggagacagattatggcaaatccaatcgtaacatttgagatggaaaacggagatgtgatcaaggcagaattatatccggagatcgcaccaaatacagtgaataattttatttctttagtacagaaaggattttatgacggactgatcttccacagagtgatccgtggattcatgatccagggaggatgtccggacggaacaggaatgggcggcccgggatatcagatcaagggagaatttaagcagaatggatttacaaataacttaaagcatgagccgggagttctctctatggcaagagcaatgcatccggattctgcaggatcacagttctttattatgcacgaaacttctccgcacttagacggatcttatgctgcattcggaaaggtaacagatggcatggatgtcgtaaataagatcgcagagacagcgacagactacagtgaccgtccgttggagacacagagaatgaagaaagtgactgtagatacaatgggaacagagtatccggaaccagagaaaagataacaagtatctttggaaatgaagaaaagagctgcacaccaaaacaaccggtgggcagctttttctcttgcaatacgacttggcttccagtacaataaaaggcagctggcaacaatgagtagaaagcgaggaacagccatgcgaatgattcagacagagaaacttgtatatgaatatgaaaaaagagacgaagaaggaaatataatcggaagtcatcgggcaatcaatgcggtcgatgttcatgtggagccgggagagtttgttgcgatccttggtcataatggttcaggaaaatctacactggcaaaacatatgaatgcgatcctgacaccgacagaaggtacgatgtgggtaaatggcagagatacgaaagaaccagataatctgtgggaggtcagacagtctgcggggatggtattccagaatccagacaatcagatcatcggaaccgtggtagaggaggatgtcggatttggtccggagaaccttggagtgcccacagaggagatctggaaacgtgttgagaaaagtcttgaggcggttgggatgatcgagtatcggcatcattccccgaataaattatctggagggcagaaacagcgcgttgcgattgcaggagttgtggcaatggagccaaaatgtattgtactggatgaaccgactgcgatgcttgacccaaatgggcgtaaagaagtgttgcgtgccgtggaagaacttagacgtcgggagaaagtgacagtgattctgatcacacattatatggaagaagtagttgatgctgaccgggtaatcgtcatggatcagggaaatgttgtgatggaaggaacaccgagggagatcttttcccgggtagaggaattaaagaaatatcgattggatgtgccgcaggtcacgttgcttgcctatgaattgcagcagagaggtctgccgctttcaaacggcattttaaagacagaggaattggtgaaagaattatgtcaattacattagaacatatcaattatacatatagtgaagggacagcctatgaaaaaaaggcgctaaaagatatcaatttggagattccccacgggcagtttgtagggatcatcggacatacaggttccgggaagtctacactgatccagcatttcaatggattgatcaaggccacgagcggggtgttgaagtataatggggagaatatttacggggaacagtatgacttgcgaaagctgagaagtcaggtggggcttgtgtttcagtatccagaacatcagttatttgagacagatgtgatcacagatgtctgtttcggaccgaaaaatcaaggattgtctcccgaagagtgtaaggagcgggcaagagaggcattaaaacttgtcgggtttccagaagagttgtatgaagtatctccatttgatctgtctggcggacagaaacgaagagttgcgatcgcaggggtacttgcaatgcatccacaggtactcgtacttgatgagccaaccgcagggctggatccgaaagggagagatgagatcttagatcagattgcccttctccatgaaaagaaagatatgacggtcattcttgtatctcacagtatggaagatattgcgaaatatgtggagcgcatcattgtgatgaatcgcggagagaagatgtatgatggaactccgcgggaggtgtttgcgcattacaaggagctggaagcagtagggcttgcggcaccacaggttacttatattatgaatgctttgagagaaaatgggattttggtatcatccgaggcgacaacggtggaagaggctgcagacgagattctgcgagtggtatccggggagaagaaggaagcaggcagcagagatgggcaggtgagaaaatgattcgagatataacaataggacagtattatccggcggacagtattttgcaccgcctggatccgagagtaaagatatcttgtacattattgtatttgatttctttgtttctatttaagagtgtacttggatatgtgattgccgggtgctttcttgccggagtgatctggttatcaaaggttccagtcaaatttattgtaaaaggattaaagccggttgtaatgcttttgatgatcacagtgatttttaacttgtttttgacaaatgaaggggacgtattagtcaaagtctggatttttaaaatcacggaaggaggacttcgcacagcggtatttatggcaatccgtcttgtatttttaatcgcaggttctacgatcatgacattgacaacaacgccaaatgcgttgacagacgggattgagaagctattaagaccgctgaataagattcatgttccagtgcatgagattgcgatgatgatgtcgatcgcgctgcgctttattccgattctgctggaagagacagataagattatgaaagcacagatcgcaaggggggcagatctggagagtggaaatattattcaaaaggcaaagaatatgattccgatccttgtaccgctgtttgtctctgctttccgtcgtgccaatgaccttgcaatggcgatggaggcaagatgttaccgcggtggggatggaagaacaaagatgaaaccgcttgtatatcattcacgggactatctgtcttacacagtgatggcagtctatcttgtcatcgttgttggaatcggaagatatgtgccgtttcatctgtggatattttagagggtgagttatgcagaaaaagagaatcaaactgacgatcgcgtatgacgggacaaattactgtggatggcaggtacagccaaatggaatcacagtggaggaagtgatcaataaggcactttgtaaactgactggggaagatattgcagtgatcggcgccagccgcacagattctggggtacatgcccttggaaatgtggcagtgtttgacagtgcgacaagcatcccgccggagcggatcgcgatggcattaaatcagagactcccagatgatattgtgattgtaaaatctgaggaagtagccacggatttccatccacggtattgcgattgtgagaaaacatacgaataccatattatcaatacgcggacgccaattccgaccaagcgactgacaaactattttgtttcctacgatcttgacgtagaaaggatgcagcaggcggcagattatcttgtcggagagcatgactttgtcagtttctgtaatgtgcggacacaagtggaagatactgtgcggacggtgaccgagctggaagtcttgagagaaggggaggagattacgatccggatcagcggaaacggattcctctataacatggttcggattatcgtgggaacactggttcgcgtaggaagaggattttatacccctgagaaagtgaaagaaattttggaggcaaaagacagaaaggctgcaggagtgactgctccggcacatggtctgatgctggtggaaatccgttatccgaagaaatagaatagtgaaaagaaggaagctaaagaaatgtattttgaggttgtgaaattttgaaaaatcagaaagaaacaccctatgaaatcataactctttagctttttttattgagaaaagtcaactttgtgtctcagattgcagtagggggcagagaaagaagcaagaattccgtttgatgatttaaaagaaatacgttagaatagagggggttaagttaaaaagttcaaaaatatgatggataaaaataaagataaaggagcaaaaaatgaaagcattagtaatcgcggagaaaccttccgttgcgagagatattgcgcgtgtattaaagtgtacaaaaaatatttctggtgcgatagagggagagaagtatgtagtgacatgggcgctcggtcatcttgtgacgctggcagatccggaggaatacagcaaagagtataaagagtggaagatggaagttcttccaatgatgccaaagccgatgaaactgattgtgatccagaagacggcgaaacaataccgtgcggtaaaggagcagctgtttcggaaagatatcggggagattgtcattgcaacagatgcaggaagagaaggggagcttgtggcgagatggattcttgagaaagcgggatgcaaaaagccgatcaagcgcctttggatttcttctgtgacagataaggcaatccgggagggatttgcaaagctttgtgacggcagaaaatacaatgatctttatgcagcagcggtatcccgcgcagaggcagattggcttgtcgggatcaatgcgacacgggcgctgacctgcaaatataatgcacagctttcttgtgggcgtgtgcagacaccgacattggcaatgatcgcaaaacgagaagaagaaatccgcgcatttcgcccgcaggaatattatggtcttcaggtgcaggcgggaaagattcagtggacatggcaggatcaaaagtcgggaggtttccggtcgttttcaaaagagcggatagaaactatcagcagttttgtttccaatgagaaactgtctgtgaaaaaggtggagaaagcagcgaaaaagaaatatgcgccggggctttatgatttgacggaactgcagcgagacgccaatcaaaaatttggattttctgcaaaggaaacgttaaatatcatgcagcgactctatgagaatcacaaagtgctgacgtatcctcggacggattccagatacattggcacggatatcgtagatacgatcaaggacagactgcgcgcaattagtgttgggccatataagaagctggcaggaagtcttgtgatgaagccgcttcgcacgaacaagtcgtttgtagatgataaaaaagtaagtgaccaccatgcgatcattccgacagaacagtatgtccagctggaacatatgacaagtgaggagagaaagatttacgatcttgttgtgagaaggtttttaagtgtgctctatcctccgtttgagtatgagcagaccacactgcatgcggtggttttaggtgaacatgcaggaaaaaacagtgaggaacatttcgttgcaaaaggaaagatcgtaaaggaagcaggatggaaaaccgtctatgactatgaggaagaagaggcggaggaaggactgaaagaacagtctcttccaacgatagaagccggtgacagattgccggtggagcgggcggctgtgacaagaggaaagacaaaaccgccggcacattttaccgaggcgacgctgctgtctgcgatggaaaatccggtcagatatatggagagcagagatcaaaaagctgccagaacactaggggagaccggagggcttggaacggttgccacgcgagcggatattattgataaattattttcttcatttttgatggagctaaaaggaaaagaaatccatattacgtccaaaggcaagcagcttctggagcttgtaccggaagacttaaagaagcctgagctgacagcagattgggaaggaaagttgtcagcgattgcaaaggggagcctaaggaaaaaaaaatttcttgaggagatcaggaactatacggaggagctgatagaggagattaaaaagggagacggaaaattccgccatgacaatgtgacaaataagaagtgtccggagtgtgggaaaccgatgcttgcggtcaaagggaaaaatgcaagaatgcttgtatgccaggacagagcctgtggacacaaagaagtgatcgcccgcatttccaatgcaagatgcccgaattgtcacaagaagatggaaattattaaaaaaggtgatgaagagcagtttgtatgcgcgtgtggacataaggaaaagatgtctgcattcaaggcacggagagccaaagagggtgcaggggtaagcaagaaggatgtccagcggtatctgaagcagcagaaagatgagccggtcaatacagcgtttgcagatgcatttgcgaagctgaaattgtaagatggaaggatgatcggaaaagggaaacgatgcacaagaggctgagcatttttatagtgttcctatgtgagaaaatgttgtatagatgtctttgcgtgtagtataataacatacagtaaaaaagaaggaggcgcagggaaaccgacgcgcaaaggtgtgagttgatggcgcgccgtactctgcaagaaggacaatgcagattaaaaatgtaaaagtatttacagaagaaaaacagtttcaacaaggagagattgcaatcgcagacggagtttttgcaaaagaggcagacggagaagtgatcgatggagaaggttgttatgcgattccgggaatggtcgatgttcattttcatggctgtgtagggtatgatttctgcgatgggacagaggaggcgattgccgagattgctaaatacgaggcagctcagggagtgactacaatcgttcctgcaacaatgacacttccggaggagacactgatggagatttcaaagattgctggaaattataaggcaacggaaggagctgaccttgcaggaatcaatatggaggggccgtttatcagccctggaaagaaaggggcacaggcatccacacatattgtaaaaccggatattgcgatgtttcgcagactgcaggaggctgcaaatggactgtatcgtttggtagatattgcgccggaagtagatggggcaatggaatttattgaggaattaaaagaggaagtcaatatttcttttgcacatacacttgcagattatgatattgcgaagaagggatacgatctgggagccaatcatgccacacatctgtacaatgcaatgcctccattttcacatcgggcaccaggagtaatcggggcggcacatgacagtgcacattgtatggtagaattaatcacagatggggtacatatccatccatcggttgtgcgtactactttcgatatgtttggagatgacagagttgttttgatcagtgatagtatgagagcaactgggatgccagatggagagtatacacttggaggacaggcggtacaggtgagaggaaatcgagctacattggtagaaggaggtgcgttggcaggatccgtgacaaatctggcagactgtgtgcgcgtggcagtgaaagagatgcagataccgcttgaaagtgcagtggcagcagcaacgatgaatcctgcaaagagtgtgggactttatgataagtatggttcaatcacagaaggaaaagttggaaatgttgtgctgcttcgggaagatttatcactcaaggcagtaatccaaaatggaagagtgattcgttgggaagaataagtttgataggaaaaaattaattatttataaaagaaaaaaagaggagacaacaggaaatccgagaggggaacctgttgtctttttctaatttttatttattataatctttttgcacaaagaaatttagaatttatcgatgacgaaatgtaagatttctgacatacgcttctgaaggtattcagagcaaagttctggatgattacattttttttctaaaagatcttttgtgagactcacagtgatgtctgtgataatgtcgagagttttttctgtaacccttgtacgcggatcatcaattagtggaatcagaatctttctgcatctctctgtatagttttttccgaaatacattgcctcaatatctgaactgaatttattacgttcttctggaaataaatcataataaatatttaaaaaatcaggaagattatcgctgtgttttccgaagaaaaagttgtggaaaatacaagaatactttaaggcagattctgcgaagcaatcccaaatagcatagaatttttcataaacatcagaagtgtaatttagagcttctaatttttcgctgtatttttggaaacgagaaatagaagcaagcataatcagctcatctaaatcttgaaagtaaaaataaatagtagagttatgaaaaccggaggcagtggcgatttttcggatagacagatatttcaagccatcttcatcaagaagtttttgtgttactttgataaattgaatcaaattctcgcgcttagagttatcttttgtatagtcgatcatagatgttcaattctcccactctttatttagataagttaaaacttatgtgattagtatagtacgaaaaagaagggaattcaagagaaaaggtttatagaaaaaaatgataaatgatattgaaaaaagctattgacaataagcgcgcttagtgatagtttaatagtataaatgacgtactaagcgcgattagtaaaaaataaattgtgcagaatgcacataaaacaaggaggaaaaaatcatgagactagaaataggaaatttctatgtgaaagacattgtttttggaaacgagctttcatatgaagatggtattcttacaatcgagaaagaagccgcactgaattatatcagacaggatgaaagaattacagaagcagaactttacattgcaaagccaggagatcaaattcgcatgtgtccggtaaaagaagcaattgaaccgcgtgtacgtccagatgggagaagtgcatttccgggttacacaggggatatgacaagagcaggcgagggtgtgacatatgctttgaaaaattgtagtgttcttgtagtcggaagacattggggcggatttcaggatggaatcatcgatatgagcggagaaggtcagaaatatacactttttggtcaattgatgaacattgtacttgttgcagatacaaatgaagagtttgaaaagcatgaacagcagaagaaaaatgatgcattgagaagagcggggcacaaactggcagaatatattgcaaactgtgtcaaagaattagagccggaggagacagaagtatttgatcttggagctatgatcaaacgaggagaagaagtagaaaaacttccttcagtcgtatatgtgatgcagccgcagtctcagatggaagaattaggatataatgatcttgcctatggatgggatatgaatcgtatgcttccgacggtgatggatccaaatgaggtgttggatggagcaattgtatcaggaagtttcatgccggtttcctctaaatggtctacatatgatttccaaaattgcccgaatatcaaggcattatataaagagcatggaaaaacaatcaatttccttggtgtaattatgtcaaatttaaatgttgctctggaacagaaagaaagagcggcgctctatgtggcccagattgcaaatacattaggtgcggatggagcagtcgtggcggaagaaggatatggaaatccagatgcggattttgttggatgcattgtagcattggaagatgccggggttaagacagtcggaatttctaatgaatgtacagggcgcgatggacagtcacagccacttgtaacattggatgaaaagtgtgatgcaattgtatcttgtggtaatgtttcagaattgattgaacttcctccaatggaaaccgtactcggtgaattgcaggctcttggacgtgatggattgtccggaggatgggcagcagatgagaaactcggaccatctgtgcgagaagacggatctattattatggaaaacaattctatgttctgtggagatcaggtatgtggctggtcaccaaagaccatgaaagaattttaaggagggaatttataatgaagaaagcgattttatatatcaatcaattttttggtcagattggtggagaagataaggcggatgttgctcctgagattcatgagggaaaaatcggaccggcattagaatttgcaaaagatctggatgcagaaatcacacataccattatttgcggcgataactttatgggatccaaaacagagcaagctgtcagcacgattttggatatgttgtcagacaaagagtttgatctgtttcttgcaggacctgcatttcaggcgggaagatatggagtagcatgcggaacaatctgcaaagctgtcaaagaaaaatacaatgtaccggtaatcacatcgattaatgaggaaaatccgggtgcagagatgttcaaaaaagatatgtacatcttaaaaggtggcaacattgcttccagaatgcgtgcagatgtcaaagcaatggtaaatcttgcaaataagattttaaatggagaagaagtaggaagcgcggacgaagagggttatttcccgcgtggagtacgcaggcaggtgtggagaagagatggaaagccagcttcagaaagaatggtagagatgctggtgaaaaaattaaatgggcaaccatttgagacggaacttccaatgccaaagctggacagagtaccgattgcaccggcgatcaaagatctcgggcatgctaaaattgctctgttaaatacaggcggtattgttccagtagaaaatccggatcatattcagtcagcatcggcaacaaggtggggaagatacgatatttccggagatgcagtattaaaaggaggagaatacaaaacaattcatgcaggctttgacccggcggcagcagatgcagatccgaatgtcattactccggtagatgcattgaaagagcttgagaaagaaggtgtttttggaagccttcatccttacttttatacgacggtgggaaccggaacaacacaggcggaagcagagagaatggcaaaagagattattccatatctgaaagaagacggagtagacggtgtcattatggtttctacatgaggtacttgtacacgttgcggtgcaacgatggtaaaagaagtagaaaaagcaggatttccaatcgtgcagatgtgtaatttgataccggtagcaaaaacagttggttctaatagaattgttccgacaatctctattccatatccgttgggagatccagcaacaacgaaagaggaacagtggaagttaagataccatagaacgaaagtggcggtggaatctcttgcagcagatatcacagagcagacagtattcaaagtataaagggggaaccttgaatgaaaaaatcaaaagcaggaagtgcagtatttgttgtttcacttgttttgattgcaattatggctatatggtcagtggcgttaaatgagagttttacaaaagtttctaatgcagcatttacgtttttgacaacagattttggatggctgtatctgctcgcaatgatgatctttttagtatttgttatctacatggcttttggaaagtatggaaagattcgtcttggaggggatgactctaaaccggaatacagtaatcttacgtggtttggacttctttttggatgtgggatgggcgtaggtcttgtattttggggtgttgcagagccgttgacacattacttaaatccggtgggcgtagaaagctccacaccggaagcagcagacttcgcaatgaaatccttttttatgcattgggggatccttccatgggcaaactatgcggtgattggactcgcactggcatactttatgttccgaaaaaataaaaaaggtcttgtaagtagcatattagaaccgttgatcggagaaaaattagcaaatggttggctcggcaaattggtagatattctggcagtatttgcgacagtagcaggagttgttacttctctggggcttggaacattacagattaatgcaggtttcaatcgtttgttcggtcttccgacaactttagcggttcagattgggatcattgtagtagtatcaatactgtatattggttcggcggtatctggtattgacaaggggattaagatcatttcggatacaaatttatatgttgcagtcggtctccttgttgtatgttttttagtgggacctaaaattgaaattttggatagttttgtaaatggaatggggcaatatattggaagctttgttccggatgcgcttgctgtcaatgcatatggggataatagttggctcggaagctggagattattttattgggcatggtttattgcatgggctccttttgtcggtgtatttattgcccgcatctccaaaggaagaacgattcgggaatttttgcttggagtagttcttgtacctgcgattgcttcttgtatctggggagcagtatttggaagtctggggatcaatcttggggaaacaggcgctatggcgattgaaaccttgaaagaagttgtggcaacaccggaagttggactatttatggttcttgaggaatatccgcttggatcaatcttagcaattgttgcaattatttctttgtgtgcattctttgttacatcagccaattctggtgtatacgtgctatctatgctaacaacagacggtgcaatcaatcctccaaacagtaaaaaggttttatggggaattattcaatccataatggcaataggtcttttgatggcaggtggattgaaaccactgcaaacgatatcgttagctgccgcatttccatttatatttattatgtttggcgcatgtgcggcctttatcaaatcggtgaaaaaagaaaagatataaacaactctgattttcttagctagggataggcaatggaaaagcggaagaaggttactaaatatttatctgcagaagacggagctgtcgctttaacgatgatcaatcgtgaagcgacagctcttttttgattttataacagttcttcgtattttaacaaaatggaagtaataaatgataataaatatcaaaatcatattgaaaacaggaaaaacatatggtaatataaacgatattgaaaattatattcaaaattgcttttaggttatagaaaaaggagcttattatgttaaatatattgctttcagtaacagctacagtattatttgtactgctctgtgttatttatccgcttggaattcttagattttcagaaaaatccaaggaaaagcaaagaaagagtgtggattgttttttgcggaaaatacataaaaaaatgggagtatggataatcgtagtctcgctgcttcacggaattgtagaaatcaaagccggaaatttggatggaatgttcagtggaaaaatctgttttctacttctgatcttattatggttgagttatggattgaaacgggttcttaaggaaaaatggatgatcgtgcatcggatacttgcagtgctcacagtgattgtagtcatcgttcatgtaggaggtatgtgatgaaatttatttatttgacaatcggattttttgcatttgtgcttggttgtgcaggaatcgtgcttccggtactcccgacgacaccgtttctgcttttggcggcagtgtgttttacccggggaagcagacgggtagatcagtggttcagacagacaaaggtatataagaatcatttggaaggatttgtgaagaaccgggagatggaaggaaagaccaaagtggtgatactgacatttgcatcaatctttcttctgattgcattttttatgatggaaaatgtatatgggcggaccttcattttgtgtctgatactattgaaatattactattttacatgcaggatcaagacggtaaagaaaagagaaaagaaagggataatataccatgatgatcaacaagcgattaattaaagagatgggggagacaaagcagtacatcggaatgcaggtactgcttcaatgggcagcgctcctttgcaatatttgtctcatattttacatttccaatgttctttggcaagtggtaaaaggaaatgccggaaatatttccttgattttgagcataggagtatttgccggtgtcattgcagcacgtcgtctgtttttgaggctggaggcagcgtattcccatcgttccagtgagtatgtaaagaagaaactgcgtcaccggatttacgaacatcttttgaaagttggcgagaagtatgagaaaacattttctacttctgaaattcttcaggtggcagctgagggcgtagaacagctcgaaatatatttcgggaaatatcttccgcagttattttacagtctgctggccccgatcacactttttattcttgtttcctttatgagtgtaaaagttgcactgatcctatttttatgtgtacctctcatcccggcttccatcattgccatacagaaatttgcaaaaaaattactggcaaaatattggggcagttatgtgcagttgggagatcattttcttgacaatattcagggactgaccacattgaaggtttatcaaagtgatggctataaaaatgaagagatgaacaaagatgcagaacatttccggaaaattacaatgaaggttttgacgatgcagctaaactcagtgactttgatggatttgatcgcttatgggggaagtgcgcttggagttattttttcctgtatggaactgcgggcaggaaacttaaatatgatgcaggcgttggcaatcattttgcttgcggcagaatttttcattccactacggctgctcggttcatttttccacattgcgatgaatggaatggcggcaagcgataagatgtttcggctactggatatggaagcagaggaagtggatatggacgataagcaggagagagagaaggctggagaaaaaaatgaccgtgtgccgtatgcagtttcggcaaggcaggttacatttgcctatgaggaagaacagccgattttgaaagaggtgacagtggacatcccttctcgttcgctcgtgtcagttgtcggtgcatctggttgtggaaagagtacactggcatcactgtttatggggtatcagactgcgcagagtggaaaggtgctgatctgtggcaaggatattcggatgatcccggtaaaggagcgcatgaaacagatgacgcttgtatctttccaaaattatctgtttaaggggagtgttagagaaaatctgttgatgggagatccatctgcaacagaggaaaagcttcttgcggtacttaaaaaagttaatctgtatgagtttttccaaacgcagaacggattggatacaatgctcgatgagcaggcggcaaatttgtctggtggacagaaacagagactttgtatcgcgagagcgcttcttcatgacagtgcactctatatttttgatgaggcgacaagtaatattgatgtagagagtgaagaaattattttgaagttgattagaaatcttgcgcgggagaagacggtaattcagatcacacaccgccttgccaatgtggcagacagtgaccagatttatatgatggaaaaaggctgtgtgatcgagaaaggaacgcaggaagaacttcttgaaaagcaaggcgcatatgcagacatgtatgaactgcagaaagcgttagaacaatatcgggaggaggcaatataatgaagaggagaagtggaatcaaaatcgtcatgcagttgatcggacttgtaaaaccgatgtggctgattatgacaggggcggtcattcttggagtgattgggtatctctgtgcaacatttattacgatcctgggaggatacggtcttctcggagtgctgggagtccagacaaaaatgtccttacataccgtttttatcgttgtggcagcgcttgcggttcttcgaggagcgctccgctatggggaacaggcgggtaaccattacattgcatttcgtctcctggctctgattcgggataaagtatttcagaaacttcgtaaactggctccggcgaaactggaaggaaaagacaagggaaacctgattgcaatactgacaagtgatattgaacttttggaagtattttatgcacatacgatttcgccggtctgtattgctgtgttgacttgtgcggtgatgattgccttttttgccagctatcatccggcacttgcgctaattgccttggcaggatatgtgacagtcggagttattcttccgataatcacaagtaagatgggaaaagaggatggaaatcgctatcgcaatcagttcggggagatcaacacttattttcttgacagtatccgaggtcttcgagaggtcattcaatacgattgtggagaagagcgattggcaaatatagatcagcaaagtgaagcgctgacaaaactgcagggcagattaaagaactgcgaaggcaaagcaagagcaaactgcgattgtgcgattctcgctttctcgtttctgatgttaatgacttctgtatatctcttccagaaagggatgttaaatacagagggggttgtgatcagtacgatttcgatgcttggctctttcggaccggtgacagcactcagcaatctcgcaaataacctgcttcacacatttgcgagtggtaaccgggtattggaactgctagaagaagagccgctgatccaggaggtagaagaaaaaggagcagaaccttcttttgatggcttccacgtaaaggagcttacgttctcttacaaacagggtgaggaggaagaacagatcctgtcggatgtctctctggaaattccaaagaacgggatacttggaatcgtaggaaagagtggttctggaaaatcaactttgatcaaattgctgatgagattctgtgatgcagagaaaggagagataagcatttccggcaaaccgatcaaagagtggagtacaaacggtcttcgcgcactggagagctacgtgattcaggatacatatttatttgaagataccattgaaaataatgtaaagttggcacggcttggaagtactcatgagcaagtggtggaagcatgtaagaaggcaaatatccatgaatggatcgaaagtcttccaaatggttatgacacagtgatcggagaaggaaatcatcagctttccggcggagagcggcagagaattggaattgcaagagcatttctgcataatagtgaggttattcttcttgatgaaccaacaagtaacctagacagcttaaatgaagcagagattttaaaagtgcttaaagaacaacagaaagataagaccattattctcgtatcccacagacagtctacaatgaagattgcagatcgtgtcatccggatgaaagaaggacgcgcttcttaaaagaaggggggaattcatcaaagagtcattgacgcatttctttctaatagtgtagaatgaagaaagaaatataagaaagaatataaaaaataaagtgtcgcaggatgtgggctgcggcactttttgattttaatagtataaaaatttaagaaaagatttaaaaaggtatcttctagtagaagttatacggtctgttccgctacttttgttactttactgggttccctcatatatacgagaacatacatcacagcgcccatcgcacaggcgagaagtacatcgataacagagtgctgttttaagaacattgttgataaaatgatcagtacagtcaatgcgagagagccgtagtggatcagcgtgttctcccggagcttttgattgtgggagatggcgatgtaggcaccaagggaattgtacacatgaatactcggcagaatattcgtcggcgtgtctgtagcatagagggtacgaaccatatctacaaatatattctctctggcaaaggtatccggtcttaataactgaccatttggatatagcgtggatacaatcaaaaagatagtcattcctgtgaaaaggaagagacagagtctgtaaaattcgttcgtattacagaagaaaaagtatccgatcgtcacagcgataaaagcgaaccagagcatatatggaactataaagtattcgataaaaggaatcttatcatccaacggggtgtggataacatgaaattttgtagtcacatgctgttctaagtaaaaaaaccatggcagatagatcagtccatagagaaatacccacgcatgcttatattttttcaaaaatgttttcatagtttttacaactctctttcgtcattgtcggatcactgcctgacagagcctgtaacaacagggtaaaggcggtttaagttataggagattataacatgaatgaaatggaacaacaactaagttcatagtatcttaataattttccggaaaaattttataaattacttttgtattgtctgtggtgcgatcatgagcaggcgttcttgttcacaggtgacggagatggcatcctgaagaaaggcagactcaccgtctgcatgtactggcataggagcgctggtatggatatggacctgtttgcatcggaatgtgtcgacgccttttagagaggtatgccagccaaataatccgattgccatcaaaaataatagttttatcttagagacatcgtggatcatacagagatctaacttgccgtcattgttctgagcattcggacagaagcgaaatcctccgccttcgaaaggttggttcatcacggcggcaaagtgaagcttctcgaaagtgacttctgttccgttgtcaaacgaaatgcggcagcggcaaggtttgtgcagcgcaagttcgcgcagtgaaataaatgcgtaggaaagcttacctaagtggatacggttcagtaagactttcagtctggacaccagagcctggtgacagattgcggcgtcaaaaccaattccggtgctgacggcgaacttccgtatttttttcgtgtctttttcagaatatttgagaactccaatgtcaacggttcggtaactgtttggagacagtatcagttccaatgctttttgtggatccgatgggagagccattccctttgcaaaatcatttccggaaccggttgggatatatcccaggataatatgctccggatgttctatgccatttaatacttcattgaccgttccgtcaccgcctacaacaatcagtgttgtgcgggaagagaggtctttcgtaagctgttgtgcaagttttgtgccatgtcctcggtgagaagtgaaatatacgcgatataaaatgttccgttctttcaggagtgtttctatttctgtccagatctggctcgcatgtccggagcgggaagctggatttacaataaatatgtacatgagtctatactctcctcgtatctgctgttttttctcaagtatacaacaaaaaaagaggaaatactacttttgtttgctaagataaagttgacgaatagaagatcgagggataaaatatttataacagaaatattggtataaaacagaaaagaggaaactatggaacggacagaaaatttgaactttaatcagacagacagggtggcggcaatcggaaaggcgctttcatccgaaattcggatacagattttagaggcactcgaagaacaggaacacaatgtcaatgagctggcagaacttctggaacttccggcttcttcgacggcaatgcatgtccgggtgctggaggaggcaggattgatcgagacggaacttcgagcggcagtgcgtggttctatgaagatgtgcaggaaaagtgtcgacagccttatgattcagcttcggaaggaaaaggatgaaaaggtggagaagatcagtatgccgatcggaaattatgtggattaccatgtggaaccgacctgtggaattgtatcgggagatggacatattgatatggaagatgagccggcagtattttacaacccaagaagagtagaagcaaagcttctctggtttgggaatgggtatctggaatatcgcttttccaatgcttcactcaagaaaaatacactccgtaaactggaaatttcagcggaagtatgcgcggaggatcatgaatataatatggactatccgtccgatattaccgtatgggtcaatgagatcgaagcaggcacttacgaatgtccaagcgattttggcggaagaaagggaagactgacaccgaactggtggccagagcagaacacgcagtatggagaactcaagacatggtgtttgaaaaaagatggaacatacctcgatggaaagaaagtgacggaacatgggctggcagaatttaagctggaagagcaggaatatatttcagtcaggattggagtcaaagaagatgcggtacacaaaggaggcatgaacctgtttggcaatggatttggagattatccgcaggacattgtcatgaagatgtggttctcgtaattgcggcagaatagattttacaaaatatggaaaaagaaatccgagaataaaaaaacagatatatcacagagaaaaaaatttcctgtggatatatctgttttttgttggtctttgctgagactgttatacggattttatctggcttttctttgcatcaatatctcagaagcaaagaaagttttctagcgaggtcgttttggcatctcccacgcattatgatcggtatgaagcaacagatgtgccttgtgtgagagtggtttgcccataaagtcttcgtacagttttaatacatctttgttctcgtgtgagaatcggatatttgcatttttatcgaggaagtacagattctttccacgttcaagggcgagctcctgaccatcgtggatcggttgtccgccgccgccgacacatccgcccggacaggccatgacttctacaaagtcatagtggacatcaccgcgctcgatcatttcaatcagttgtctggcattgccaagtccgctgacaacagctgctcttacaactgtatcaccgattggaatctctgcgcagacagcaccgtgatttaagttgttgcttctgacaacagagaatgcatcggcatccgggttctttccggttacgaggaagtatgcggagcgaagcgccgcttccataacacctccggttgccccaaaaatgactccggcgccggaaccatcctgcatcagcgtatcacaaggggaatctaccaaagtagatggtgcgatgtgagcggagcggatcatgcgcactagttcacgggttgtcaaaacgatgtcaacatcatggccggcatattcttcatagaagagttccatattgcgttcgcctttctttgcaagacaaggcatgatcgataccgtacaaatattttccggatctacaccaattgatttcgcaaagtatgttttcatgaccgcaccgaacatctgctgtggagattttgcgcttgataactgcggcacaaggtgcggatactgggatttaatgaaacggatccatcctgggcagcaggaggtgaacatcgggcggtctttgagttcgccgttctggagccgttctaaaaattctgctccttcttccatgatcgtaaggtcagcagagaatgctgtgtcaaatacatagtcaaaaccgatctttcgaagagcgtcgacgatctttccgaccgttgcctcttctcgtttcatgccgagtgcttccccccaggctgcacgaacagcaggtgcgatctgtacgacagtgatttttttcttgtcggcaagtgcagaccagactttttcagtgtcgtcgcgttcgcgaagtgcacctaccggacagtgggtaatgcactgaccacagagcgaacagtcagcatcttcaatcttacgattctttgatacgtgtacagttgtgcgggatccggtgctttctacatcccagatattcaaactctggatcttgtcacagacttgaatacagcgcatacatttgatgcatttagaagaatcgcggatcaatgggaaatctttgttccacggagtctgttccaattcttgttgaaacggcacttcaagaatgttcaggtcatttgcgattttctggagagtacagtttccgctctttacgcaggttgcacagcggcagtcatgctgagagaggatcaactctactgtttttcgccggttcatgcgaactttcggactgttagtgtagatgaccatgccctcttctactttattattgcaggagatgatcagtttatctttgccctccagttcgactacgcatacacggcaggcgccgatctcgttgatatcttttaaataacataattttggaatcgggattccattatgttcggctgcttccaggatcgttgtgccggctggcacagtgatcggtttattgtcgattgtaagatgtacaagatttaccataatgtttctcgacctcctttaaatatgccgaagccgaagtgatcacagcgaaggcagcgagatgcctcctgctttgcttcttgttcggtcatacagatttctaccccgtcaaagtcatggatacgtttacagacttcacgttctgtcatatttactcttccgcaaggggttctgtcatccaatcttggttccggaatttctacatcagcagaaatgatatggtggaatccaagatattcatcaatattagctgcaacaacctttgctgctgcaatcgctttgatgacggaggcaggaccggttgcgcagtctccaccggcaaaaacgccagggatgttttcgaatccggcatttttctcggacatgatccgtccacgctgtaccgggacaccagcctcttcaaagtgctggaattcaatatcctgaccaatcgcaacgatcagtgttgtacaagggataaactgatcttcctcgccagtcggacgtacacttgcacgaccatctttgatcttactgatcatctgtggtgtgacataaagtccctgtacatgaccattttcatccgtgacaatgcgggaaggagatttcagtgtctgcacttcgattccttctgcaacagcgccttcgatctcttccggaagggcagtcatatcggccacacgtctccggtagacgatgctaactttttttgcgccgagacggacagcagtgcggactgcatccatggatacatttccgcctccgatgacagctacttcctgaccggttaagtcagtaggattaccgtttccgacatctcttaagaattttacagcggagagaactccttctgattgttctccgtcgattccaagcttcttgtctgtacttgcaccgattgtgatcaggacagcatcatattgttcgcgaaggctttgtacagtaatatcttcgccgattctaagtccgtgtttcacttccacgcctgtttccaggattgcctcaatatccttatcaagctgctttttcggaagacggtaatttgggattccatagcggagcataccgccaagttttggaagcatctcataaacagtcacctgatgtcccatcagctgaaggaagtaagcactgctaagtcctccaggtccgcctcctacgacagcaactttcttgccggtagatttggcgcatttcggaggtggaacctttccggaaaaatctgcggcaacgcgcttcagtccgcggatattgatggagtcgtctaccatgttgcgacggcatctggcttcgcaaggatgttcacagatatatccgcatgtagttggaaatgggttgtctttgcggatcagtcgtactgcatcggcatagcggccttctcctacaagtgcgatgtatccagggatatcaacctttgccggacagagcgaaacacaaggtactggttggtggaacgtgcaggtacagcgtccctgacggatatgttcttcgtagtcttcccggtagccgataaggcctttgtataccatatgtgcggcttcatagccgattgcacagtcagcagaatccatgatggaaagcgcaagatcttccatcagatcaagtgttttcagagttgcctttccgtcaagaacatctgtgatcagatttttaagctgtccaagtccgatacggcaagggacacactttccacaagtctgtgcatgacaaagttccagaaatgctctggatatgtcgaccggacataagcccggaggactggattcgatccttctctcgaggtctttgtagagaccttccacaacaagctgggccttatccggagtcgaaatctcaagtctgctcataatatcacctctcataaatatttgtcgttttgagtttatagaaagcttcttccatcgaaaagaaaatttatataaagcaaaaaagactctcttacagcgattgtaacttatgctgaataaaaaagcaataaaagttaaaagatagtcaaaattgttaataaacagacaagagcaacaaaaaatcctttgacacgcctgcgatctatgatataataaacagagaaagtgttttaaaacaagaatattaaaacaaaagaaaggaaaaagaagaatgacggcaaaattagtggagaaatttcaggaactttttggcgcggaaggagatatccgcacttactttgcacctgggcgcgtgaatttgatcggagaacatacagattacaatgggggacacgtgtttccatgtgcactgacacttggaacatatgggattgcaaggaagagagaagataataagcttcggttttactcagtaaattttgaacggcttggagtgatcgaatcatctctggaggatctgaaaccatacaaagctgcagagtggacgaactatccaaagggagtgatgtgggcatttgaggagagaggatacaaattgccgaatggactggatattttattatatggaaatattccaaacggttccggattgtcttcttctgcttccttagaagtgttgacgggcgtgattttaaaagatatgtttggatttgatgtctctatgacagatattgctctgatcggacagttttcagagaataattttaatggatgcaattgcggaatcatggatcagtttgcgagtgcaatgggaaagaaggacaatgcgattttccttgatacgaatacacttcagtatgaatatgcaccggttgttctggaagatgcgaagattgttatcatcaacagcaaagtaaaacatagtcttgtagattctgcttacaatgacagaagaaacgagtgcgagacggcgttgaaggaattgcaggaagtggttgctgtgcagacattgggagatttgacagaggaagcatttgagaagcataaagatgcaatcaagagcgaaatcagacagaagagagcaagacatgctgtttatgaaaatcagagaacgatccgtgcggtggaagctctgaaagaaaatcgaattgaagaatttggaaaactgatgaacgagtcacacagatcactgagagatgactatgaagtttcttgtaaagagatcgatattctcgtggatcttgcatgggaaacagaaggtgtgatcggatctcgtattacaggaggcggattcggcggatgtacggtcagcattgtgaaaaacgatgcagtagatggatttattaaaaacatcggagagcagtatcttgcaaaagtcggacatgaggcagaattttatgtagtagacatcggagacggtgcaagagtgctgaatggataagtctgattgaaaagcggacaggaaataggatgagttttaggagagaaaatatgttatcagaaaatattaaaagattagtacagtatgggatcgatgcaggattgacaccggagtgcgagcgaatctacacaacaaatcttctgctggaattatttcatgaagatgactatgaagaagtagaagtaaacggggaaaaagagttagaagagatcttaggggaactgttggatgaggcgtgcagtcgtggaatcatcgagaacagtgtagtatatagggatctgttcgatacgaagatgatgaactgcctgatgcctcgtccggcgcaggtgcaggagactttctggaagaaatatgaggaatctccggaagctgccacagattattactataagctgagccaggacagcgattacatccgtcgttaccgggtaaagaaagactggaaatggacggtggacagcccatatggtgagattgatattacgatcaacttgtcaaaaccggagaaagatccaaaggcgatcgcagcggcaaaaaatgcgaaagcaagcagttatccaaaatgtctgctctgtgtggaaaatgaaggatatgcaggaagagtcaatcatccggcaagggaaaatcatagaatcatgccgatcacagtcaatgacagtgcatggggattccagtattctccatacgtatactacaacgaacactgcatcgtatttaatggaaaacatacaccgatgaagatcgagaaggaaacatttatgaaattatttgatttcgtaaaattattcccacactatttccttggatccaatgcagatcttccaatcgtaggaggatcgattttaagccacgatcattttcagggaggacattacacatttgcgatggcgaaagctccaatcgaaaaacattttgaagtaaaaggatttgaagatgtggagagtggaatcgtaaaatggccactgtcagtgatccgtttaagaagcaaggatgagaagcggctgatcgaactgggaacacatatccttaatgcatggagaggctatacagacgaagaagcgttcgtatttgcagagacagacggagaaccacataatacgatcacaccgatcgcaagaaaggtcggggagatctatgaactggatctgacgctccgcaacaatattactacagaggaacatccgcttgggctgtatcatccacatgccgagtatcataatattaaaaaagaaaatatcggattgatcgaagtaatgggactggcagtattgccgtccagattgaaacaagaactggagacacttgcagagtacattgtagagggcaaggacatttctgaaaatgaaatgatcgagaaacatacaaaatgggtagagaaattcctgccgaagtatgatacaattacaaaagagaatgtaatggacattttaaaagaagaagtcggaattgtctttacaaaagtattagaagatgcaggtgtttacaagtgtacagaagaaggaagaacaacgtttgcaagattcctgaacacattataagaaatagaaggcaggctgcatgtcaaagatgcagtctgtttttttctggaaaaaatcattgaaagcaccaggcagagaacctatgcaaaatgtgaatggcagacagaaggagaggaaatatgccgtataaaattatgctggtagatgatgaggaagaagtccgcacaagcattatccgtaagatggattgggaagcactgggatttcatgtagtgggagatgcagagaatggggaagacgcacttgagaagatccatattcttgatccggatgtgattatcacggatattcacatgccatatatggatggacttcagcttgcagagacagtgaaagaaaaatatccggggaaggaggttgtcatcttttctggatacaatgattttgaatatgcgaagcaggcgatgaagtgcggagtgacagagtacattttaaaaccggtaaacagtgaggaattaggggagattcttcagcggatccgcgagaaaagagacaagtatcttgagcagcagagagacatccggattttaagagagaattatcggaagaattttccgattttaaaagaaaagtttttaaatgactggatggaagaaaaaatcgtcaaggaagagttctatgagaagctggaggaatatgttccggagattcgggattctgataggtggatcgttgcgatgttttgtattgaacgggaagaaaccgtagagggaggtgcagtggtagaggaaaaagaattgcaccaggtgtcagtggaaaaagtaatcgatgaatatttgacagaaaagtacccatttgcacgatttatctgtgagaaggagattggagtagtgattgcgctttcgcaggagcagacggttaacgaactgctcggcgtgtttgaccagattcaaaaagtatgcagacaagtgtttgggcttcagatttccatcggagtcggaagcaggaaacagtggatcagacaggtgccgcaatcgtttatggaagcaaaagaggcaagtggataccgggcagttccggatatgggaagtgtgatctatattcgagatgtggagccaaagaagacagagacactgctttttgaggagcaggagaaaaatgcactgatccatgcagtcaaatttgaacaggaagaggagattgcgtgtgaacttacgaagattatcggccggattgcagatgggaagatttactccaggcaatgtaagagctatgtcatcagtgtattgaatagtattttgcaggttgtatggagcaatgaactggaagaacagaggatttttggatatggcacagactgctatgaacaggtgctgcatatgaagacgacagaggaagtagagcagtttcttctgaaactttgctgtgagatccatacgcagcttgtgcagagaagagaaaatatgacgattgatatcattaaggaggcaaaagagtacattcaggagaattatgccaatccagaactgtctgttgagatgttgtgcagcagtctgcatctgagtccatcttatttttctactgtatttaagaaggaaaccggacaaaattatgttgcctatctgacggatgtacggttaaataaagcggtggaattgttgaatcatacagatgacaagacgtatatcattgctgcgaaagtcgggtatccggagcccaattatttcagttatgtctttaaaaagaaatttggtgtatcaccaagcaaatacaaaggaaaatcataatgaatagaaaattttatcagaagtggaacgcattttattcaaaagtcagcctgcgctatgtgatctggggggcatttacactcacagcgcttctcggtgcggtgctgatggggacttctttttataaccgattttcgcttcagcttcagggaattgtcgaaaagcagaatcgggcgctgattgaacaggtcaataatacgttgacatcagaactgcggaatattatgagaatttcagattctctttacttttcggttttgaagtctgaggaaaatgttccggtggaagagggctttgcgcttttgtacgatacgaacaagtcgtctatccagaacattgccctgttttccaaagaaggggacttacttgtttccgcaccggcagcaaaattaaagcctggggtagatgtgacgaaggaagcgtggtttcagaatgcagtgacacagacagaaaatcagcatttttccaggccgcatgtacagaatttgtttgtcaacagcaaggggaattatgcacatgtactgacgttgagcaggatggtgcaggtgcctgatgcctatgaggtgcaggatggtgtacttttgatcgatctgaaatacgaacagctggaaagtattttcaaaaatgtttcccttggggaagaagggtatatttatctggtagacggagcggggaatttaatttatcatccgcagcagcagttgatcctagatgggattgagcaggaaaatcatgagaaagcatctgcatacaaagacggggttcatgatgaggtgtttgagggacagcatcggaaggtgacgatcaagtctgtcggatatacaggatggaaaattgttggggtggtttctgataaggcggcacagctttccacagtgaaaaatattattttcctgatcgcgcttgtcatgtcttttatgttaatcttgtcaattatcaactcttatatatcaaagaaagtgacaatcccgatcgagcatctggaaggcgctgtgaagcggattgcggagggggatctggaaacaacgatcgaggagcgcggagcatatgaaatcagtcatctgggatgttcgattcgcaagatgaaagtgcggatcaagaaattgatggaagatattgtgagggagcaggagattcagagaaagaacgaactggatacgcttcagtcacagatcaatccacattttctttataacacactggatattgtcgtgtggatggtcgagaatgagaaaccacaggatgcagtacgcgcactgacggctcttgcacgtttttttcgaattggattgagcaaagggaagacgatcattacagtccgagatgagatcgaacatgtaaaaaattacctgacgattcagaagatgcgttataaaaataagtttgaatattattttgaggtggaggaggaagtccttgagctatctacgctgaagttgatcctgcagccgattgtagaaaatgcagttgcttatggaatggagtttcaagatggggatggagaagtttttatcaaagcatatttgaaagaagaaaagttgatttttcaagttgtggataatggtccgggaattatgccggagcgtctggaagagattcgcgcggggaaagttgtctcttcgaagaaaggttcggggatcggtatgcgaaatgtcggagagcggatccagcttgcatatggaaaagaatatggaatccaaattgagtcggagccggacgaaggcacttgtattacattgacgcagcctaaaatagagtatgggcaggagggagaattgctgtgaagaaagcagaaaaaataggaattatcgcggcgctctgtggaattatccttctatttttaattgcatccacagattttgtgttggaagagaaccgaaaagaggtgtataccatcgcatttgtaactgacggaagtgcagatgaccgctttcaatccctccggaagggtatggagaaggctgcgaagaagtggaatgtagatctagttgtggatgcaccatatctcagtggaaatgctgcagagcaggaggctgcgatcgaagaggcggtggaaaatggcgcgcaggcggtgatcacagtgccggcagaccaggtacagatggaaaaatttctggatcagagcaagcttcaggttccggtgatcacgctggaaaaggagcttcattcggaaaaaaaatttggagcctatatttgtgacagtgaaaagtcagcaaaaaagctggcgagagctgtactggaagaaaagaaagacgcaagcgttgctctttatgcatcagatgtctcggcaaaagagactgcaaattgtctggatatattagaaaaagaattggaagacggaggctgcactgtgatccgcagacagtaccgtcaaggatttgagatcgaaggagaagttgtcgttgcagcagatccatacacgttttcgcaaatcgtcaatttacagaaaattcccgacaggctttacggaattggctgttcgaacaagatgttgactttgcttgaagaaggaaaagtgtgtgcggcagtgatctgcaacgaatatgacaaaggatatctgagtgtggaggcggcgatgaaaagtatccagaatgggacgagacagcggacagtaaagatggagcaggtgcttgtaagacaggaaaatctctacgacaaagaatatgaggcattgttgtttccaatttcatagtggaaggtcagggataagtgatgagagagtacaaaaagtggaaaacacagatggggcttttggcggtggcagtggcagtgatctgtgtggcagcagcgggcatttcaagaagaaaagaaaaacagaaagaagaggacacactcaaagtcgggatctcgatttatcaaagtgatgatacgtatgtaaatttgttgacaaaaaaaatagagcggcagttgaaagcatgcgagaagcagcaggggatcaagattcattgcaagattgtatccgcagaaaatgatcagaatgaacaaaatgagcaggtggaacatttcgcagcgcttgcgtatgatgtcatctgtgtcaatgcagtggatcggacaaatgtgtcgacgatgatcgatcgtgtggaggaatcagagattcctctgattttctttaaccgccagccggtacaggatgatctgagaaaagggcagcatatttattatgtaggatcagatgcacaggagtccgggagattgcagggagagcttgtggcatcagtatatcgaaaggatcctgcggtgttggataagaacggagacggggttgtagggtatgccgttttagagggggagaccgggcatcaggatgccattatccgttccgagtggtcggtaaagacaatgacatcttctggagttcctgcaaaaaggatcacaggaggggttgcaaactggatgaaagagcaggcggcagcaatcgttggacggtggctgaaggaagaagagggggagctggaactgattttatgtaacaatgatgatatggcacttggcgcgatcgagacacttcgccaggagggcaggacagatatcagtgtggtaggcatcgatggcacggaggaagggcttatggcagtcagagacgggaagatgcttggaaccgtgaaggcagactctgacatttatgcggaatatattgcacgcatggtatgcgggctaaaaaaagaaggaacggtgccaaaggaaatcttggaagggcatgaccgggaagtatggattccatgggaaattaagatctgtccagaattgggagaatagagagtgtaaatctgcacaaatatgtcgaacaaaaattatataaaatgtttaaaatgatgataaaatcaaagaaaattcatagaataccatagaaatctgtatggaatcctatgaattttttgcttataatatagtcatcaagaacaagagtcgtgtttttaaaggaggaaaaaaactatgaaaaagaaaatcgtatgtggaatgttatgtgcagcaatgtcactttcattacttgcaggctgcggcggaggcagtgaggaaggtggaaaagatgcaaagaaagacggagacgcaatcaaattaggtgttctcgtgtacaaatatgatgatacatacatttctacagtacgttctgcaatcgaaaaatatgcaaaagaagcagatgttgagattaaactggatatgcaggatggacagggagaccagtcaaagcagaatgaccagttagacgttctgatttctaaaggagtagatgcacttctgatcaatgcagttgatacaggttctgcacagggacttgcagataaggcgaaagcagcagacattccggcagtattctttaacagagagcctgcaaaagaagttgtagaatcttgtgaaggtatcttcgttggaacaacagcttcagaagctggtgtaatgcagggagatatgcttgctgatatgtatgaggcagacaaagaagcaatcgacaaaaatggagatggaaaaattcagtatatcgtattcaaaggagaaccaggtaacccagaagctgaggcacgtacagaatatgctgtaaaacaggcagaggaacgtggacttgtgatggacaatatgggaatcgagccacttgttgcaaactggatgacagaccaggctcagacacagatggaagctcagatgtctgcaaacggagataagattgaagctgtattctgtaacaacgatgacatggcacttggagcaatcgctggtatcaatggaaaatcagatgctccggtattcggtgtggatgcaacagaagctggtatggaagcaatcaaatcaggaaaaatggctggtactgtaaaacaggatggagatgcaatgggtaaggcacttgttgcaatcggtgcaaatgcagctcagggtaaagactttattgaaggaacagattacgaaatggcagaagacggattctcagttcgtattccatatgcacctattacaaaatagttttaagattcatttgtaacatgtaacaaataactgaggtggtgcaggaggcaatgattcttgtaccacctctcatagagtgtatcaaaggaaagagatatgctctggagtgtatttgaaagttcttttccgcaattttcaaacgcacttcgcagtatgaggaagagtggtgagcgaaaaaatgtcagaatatattctggaaatgacgaacattgaaaagcagttcccaggtgtcaaagcactcgataaagcaaatttaatgctgaaaaagggaagcgtccacgctcttatgggagagaatggagcaggaaaaagtacattaatgaaatgtctgttcggtgtctatgtagaggatgccggggagatcaaaattgatggaaaaccagtgcgttttacaaatccgaagcaagcgcttgacaatggggtggcaatggtacatcaggagctgaaccaggtattgcggcgcagcgtaatggagaacctgtggcttggaagattcattaaaaagggcggctttattgacgataagaaatgctacgaggagacaaagaaaatttttgaggatcttgatattgatgtagatcccaaaacaatcatcggtgagttgtctgtctcacagaggcagatggtagagattgcgaaagcagtatcttacgatgccaagatccttgtacttgatgagcctacatcttccctgactaaggaagaagttggacatttatttaggatcatcaaccgtctgcgcgatcgtggagttggtatggtatatatttcccataagatggaagagattctggagatttcggatgacgttacgatcatgcgtgatggaaaatggatcgcaacaaagtctgcaaaagatatcacaatggatgaaatcatcaagttgatggtaggtcgagatctgacggaacgtttcccggagaagactaataagccgggagaagtgttgatgaaagtagaagggctgactggaaaatatatgccaagctgtatggatgcttcttttgaactgagaaaaggagaagtgcttggcgtcgcagggcttgtaggttccagaagaacagagttgcttgagacgattttcggaattgcacacagagaaagcggaaagatcgaactgcatggaaaggaaatctacaataaggattcccgtcaggcgattaaaaatggatttgcacttctgacagaagaacggcgtgcaactggtatcattccgcttcagagtattacgtttaatgcagtacttgcaaacatgaagtcttatctgaaatgtggtcttctctctacaaagaagatggagaaagatgccaaatgggtgattgacagtatgcatgtgaagacaccttcgtctaagacacatatcaaatctctctcaggaggaaatcagcagaaagtcattattggacgctggcttctgacagagccggaagtgctgcttctggatgaaccgacaagaggtatcgatgtcggtgcaaaatttgagatttatcagctgatcaatgatcttgccgcaaaaggcaaaggagtcatggtagtttcttcagaaatgccggagctgatcggtatctgtgaccgtatccttgttatgagtaacggtcgtgtggcaggtatcttagatatgaagaaggattatcacggacaggagcaggaagaaatcatgcgactggctgcaaaatacatttaacacagggggtgtcgacgtggaaaagaaaaaatttaatctcaacgaatttttattaaactatgcgttatacataattttaggattgatgatcatcgtagtcatcatcattgaaccgggatttttacatccgtcaaactttattaagattttaacccaggcgtctacaagaggtattcttgcactcggtgttgcaggtatgatcgtacttgccggaaccgacctctctgcaggacgtatccttggatgttgtgctgctgtatcagcttctcttgtacaggcaacaacatatgcttccagaatgtatccggagattacaaaagatcttccgttaatcttaccactggcagcaagtattctgatcggtgttgcgttctgtgcgctcaacggatttggtgttgcaaaattaaacttgcatgcatttatcgtcagcttaggtacacagacaatcgcatttggtgcaacatgtatttatattgacagccaggaaggcggagcacaggcattgtcttctttcaatgaaaaattcttgaactttgtcaacggatctttcaagatcggaagcttcgaacttccatacctgatcatttattttgcactttctgcaatagttatgtgggtgatctggaataagacaacacttggaaaaaatatgtttgcaatcggtggaaataaagaagctgccgcagtatccggtgtaaatattacaaaaaacattatgggtgtgtatcttgtagccggtgtgctttacggacttgcagctttcttagaggcaggacgtatccagtctgtcaatacaggtacaggtttaaactatgacctggatgcgatttcaggttgtgtaatcggtggtgtatcattcaacggtggtgttggtacaatcccgggagtcgttcttggtgtagttctccttcaggtaatcaactacagctttaacttccttggaatcaacccatacttgcaatatatcatcaaaggtattatcattatccttgcagtatccatcgacgtaagaaagtatcttgcaaagaaataaaagatagaaggacaatagcaattcctcatgtaaatctcgtgatctgcatgaggaattttttagaaaggggcaggctatgagtgaagaacagatgagaagcgcagaagaggaaatagaagaaaaggaaatcacagagagcaaaacagaggaaatagcggaacaagatggggagaatatgcaggaagaaaagccggaagaagagaagaagaccggatttttaagcagagaaacactttattccaaaatcaatatttcactgaaatctatggaccgtttcattgcgatactcattattcttctgatcgtactgctcggtgtggggattttcagttaaaagttttggggacgatctaagaaagcgacaacaagaaatacagaacaagcaaaaaaggaaaggcagggtcttcataggaggaaagcctttccttttctgataggaatttgattttgcgtttgaaccgggaataagctataataaagcgtaacagtataaaaagcagagaggaaagaacagtatggatatgattcagaaactcacagaagagctggaagtaaagaaatggcaggtagaggcagcagtcagactgatcgatgagggaaatacgattccgtttattgcgcggtaccggaaagaggcaaccggctctctgaatgatgagcagcttagaagtttacatgagcagctgatatatttacgcaatcttgaggagaagaaggagcaggtactcgcttcaatcgaggagcaggggaaattgacagaagaactgagagtgcagattataaatgcccagacgcttgttgctgtggaagatctgtaccgaccatatcggccaaaaaggcggacaagggcgaccattgcaaaggagaaaggactggaaccgctggcgacacttctgatgctgcaaagaatacaaaagcctttggaagaagaggcgcaaaaatatatttctgcagaaaaagaagtacatacagtggaagaggccattgcaggtgcaaaagacatccttgcggagacagtttctgacgaggcagattaccggagttttattcgaaatcttacggtgaaagaaggaaagatgatttcttcggcaaaagatgatagtgtgcagtctgtctacgaaatgtactattcttttgaagaaccagtcagcaggctggcaggacaccggatccttgcactgaatcgtggagagaaggaaaagattctgaacgtgaagattgaagcgccggaggagaagattctgcggtatcttgagaagaaaatcattgtttccgaaaatccatatacgtcagaatatttaaaagaagtggcagaagacagctacaaacgactgattgctccggcaattgagcgggagatccggagtagcctgacagaaaaggcagaggatagtgccatcacagtatttggaaaaaatctggaacaacttctaatgcagccgccgatcgttggacaggttgtgcttggatgggatccggcatttcggaccggatgtaagttggctgttgtagatgagactggaaaggtactagatacgacggtaatctatccgactgccccgacgacaccacagaagatccaggcggcaaaggatacgttaaagaagctgatccgcaagtaccatattacgctgatctctgtcggaaatggtacggcatcgcgggaatcggagatgatccttgttgaactgttaaaggagatcccggagaaagtacagtatgtgatcgtcaatgaggcgggcgcttctgtctattctgcaagcaagctggcgacggaggaatttccgaattttgatgtgggacagagaagtgcggcatccatcgctagaaggctgcaggatccgcttgcagaacttgtgaagattgatccaaaatcaatcggtgtcggacaatatcagcatgatatgaaccagaagaaattgagcgaggcgctttctggagtggtagaatcctgtgtcaaccgggtaggagtagatttaaatactgcatcggcaccgcttctctcttatatttccgggatcagcagtgcgatcgcaaaaaacattgtagcgtacagagaggaacatgggaaattccagtcaagaaaggaactgctaaaagttgcaaagcttggaccgaaagcattcgaacagtgtgccggatttctcaagatcacagatgggaaaaatccgctggatgcgacaagcgttcacccggagtcttatgaggcggcggaaaaacttttaaaacagcagggattttcaacggaagagatccgcagaggaggacttcgggggctttctaaaacaatcagaaatgaaaagaagctggcagaagagcttggaatcggagagatcacccttcaggatattgtaaaagaactggagaaaccgggcagagatcctcgtgaggagatgccaaaaccaattcttagaacggatgtactggaaatgaaagatctgacggaggggatggtcttaaaaggaaccgtacggaatgtgatcgatttcggcgtgtttgtggatatcggagtacatcaggatggacttgtgcatatttcgcagattaccgataagaaatttatcaaacatccactggaggcagtgagtgtcggtgacattgtcgatgtcaaagtcatgagtgtcgatgtacagaaaaagcggatccagttaacgatgaaagggatttagaagaaaaaggaacaaggaggaagcggcatggcgaaatatgtaatggcgctggatgctgggacaacaagcaatcgctgtattctttttaacgaaaaaggacagatatgcagtatggcacagaaggagtttacacagtattttccgaagccgggatgggtggagcatgatgccaatgagatctggtcctcccaattgggagtggcagtggaagcaatgacaaagattggagcaactgcggaagatattgcagcgattggaattaccaatcaaagggaaactgcgattgtgtgggacaaaaagactggggaaccgatcggacatgcaatcgtctggcagtgcagaagaacatccaagtactgtgataagttgaaagaaaagggacttacagaatcattccgggagaagacgggactgatgatcgatgcttatttttcggggacaaaggtaaagtggatgttggatcacatcgaaggggcccgagagcgggcagagcaaggagaattgctgtttgggacagtggagacatggctgatttggaaacttacgaaaggacgtgtgcatgtcagcgattattcgaatgcttcccgtactatgctgtttaacatcaaagagctgaaatgggatgatgatatattagaagagcttcagattccaaaaagtatgcttccaaaggtgtgtccatccagtgaaatctacggctatgcagatgcaagctattttggagggaaaatcccaatcagcggagcggcaggcgatcaacaggcagctctttttgggcagacctgtttccatgcaggggaagcaaaaaatacatatggaaccgggtgtttccttctgatgaatacagggacagaaccggtgtattctgaccacggtcttgtgacgacgatcgcatggggactggatggtaaggtgacgtatgcactggaaggctctatctttgtagcaggagctgcgatccagtggctgcgggatgagatgaagctgatagattctgcgaaagattcggaatatcttgctcagagagtggaagacacgaacggctgttacgtcgtgccggcatttaccgggctgggagctccgcactgggatcagtatgccagaggtgcgatcgtaggattgacaagaggtgtgaatcgatatcatattatccgggcgacattagagtctattgcgtatcaggtaaatgacgttgtgcatgcaatgcaggcagattcgggaatttcgctgagtacactcaatgttgacggaggtgccagtgcaaatgattttctgatgcaggtacaggcggatatctgcaatgccccggtcaatcgaccggaatgcgtagagacaacggcaatgggagcggcatatcttgccgggctggccgttggatactggaaggacaaagaagacgtcggaaagaactgggcgattgataaggtgttctatccaaaattaaaggaaaatgaacgggaagaaaaaattcatggctgggagaaggctgtaaaacgctcttttggatgggaagaagaggagtaaaacagtaaagatacacgcagatgtgggactgagaaaagagagggaagaacagatgaaaaaaaggagttgggtaatcgcgctgtgtatagcgcttttgacagtgctgcttcctgcagggcaggtggaagcgcagcaggtggaggaagaagaaaagaaaaaatccggaaaacgtgcgatcgatgtagcgagggaaagtggctatcagttggacgatcgttatcagccggcaggttctatcattacagagatccataccggccagattttgtgggaggagaataaagatgtttcctgggctccggccagtatgacaaaattgatgacaattttgctcgcatatgatgcgatggaggaaggaaaatttgaaaaggacatgcaggtagcggtgaatgaaaagtatgtagatatcgccggaagatatgcgctcagcaacaatgtgatgcagatgggagcaacctatacagtgggagaattgatcgatctgatcattgtcccatcttcggcggcagccacgtatatgcttgcagatttagtggagccggatccggataaatttgtagcgctgatgaatcagaaagcaaaagagattgggatgacgcatactacttattacaattgtgttggtgttacaaatgacctgctgtatccgtatgctccgaaaaatctaccggcagatgcagataatgtgacttccccacaagattacgcactgctgtgcagttattttgtaaagacttacccggatatattgacacatacgagttctccagaaattgtagtgaaagaaggtaccccgtatgaagaacattttaagtcgtatcagatttctctggaaggggcaaagtatggtctgaaagggacagatgggttgaaaactggttccagcggaagagcagggtttaattattcctctactgcaaaacgtcaggatacgaggcttgtggaaattgtgatgggggtttcggactggacagaccagaccggagaagaacttcgtcatcttgttgggaatgcaattatggaacaggcatttgagaaatacgagtatcgaaaggttctgccaaaaggaacacatcagattggaaaagagaaaattgtaacaaagaaagacctgtgggactgtgtgccaaaagaagaaaaaataaagtttaagatggaagatggcaaagtatttgttgatcttgaacggcagtatcttccgggatacgcagcgccttcagttacctatcagcagaaacagatagtttcggaagcaaaaagcggactgggcgcgataggaaaaggaatactcgcagtattgcttgccggaggtgctgcacttgtaggaagaatcgcatatgtggatgcggtcagaaagaagagacgaagacggagacggagaagaaaatagatgaatactagaaaagaaagattattctacttggattttattcgagcaatcgcggcagtttcaattgtgatcactcattttaatgctagatattccgcacatatcccagaaattaaggggagaatgatagggctggaaaaaatagggaatataggaagtggagaatggggagtctcattattttttataatttcaggggcagcattgatgtatgtctatgaaaaggagaatgattggaaaaggttttatcaaaagcgatttatgtccatttatcctatgttttggatggcatacagtgctgttttagcagtgtatgtgttgaagaaccgcacgatgattggagatggaattccaaaatggagatttctttttactatattaggatttgatgggttactcagtgtaaatggatatgcgacattttatttacttggagagtggtttttaggagcgattattttattgtatattatttttccggttttaaagaaagcaataaatacaaatttatggggagcagttgctttggtcgtggctggatatataatcggacttgttatttgcagtaagatagcgcttgtaccggcaactattttgcttgttcgattgccggaatttgcatttggtatgatttttgtaaagttaaactggagggcagactggaaaatatcgatattagcattgatacttattattgccaatatgattttcaagccggaaatcccagcaagtatacagacaacatatattggaatttcctcttttcttgtattagtttttgtgtctgctttggtgaaaaataaaggaattaaaaaaatttgtgaaggaatcagcaaatattcttatgcagtttttttagtacatcatatcattattattaatgttatgaattttgtagatcttaccaaagtaactttgttgcaaagttatcttttatttgtagtcatcggttgtatgatagcagttgttgcagggggattgtataagattaatagaatccttgtgagaaaggcttgcacaatttttaaaaccgtcgtataataggcgatatgaaaaagaataggaaaattcttcggggtagggtgcaagtcccaaccggcggtaaagtccgcgacctgcctgggaacaggtggctgaactggtgagattccagtaccgacagtatagtctggatgagagaagaatcatttgatcgcaaatcagatcgtgtgatagcggatagatttttgcgcgagaatcaaagttcccccggaagttatttcgggggaatttttactttgcaggaaatgtaggtgcaattctttcaccttttggggtatggaggaaagctgatcaaagatttccggaagattttctttcttttaaattttagaaaaagaaggagagaagaaaaatgagtacaaatgtagcagagaagacaaaggtgaacacaaggacgcttgttcagattggaatgttatcggcacttgcaattattttgatgcagtttgagattccgctcccattcgcaccggcgttctataagattgatttcagtgaggttccagtgttgatcggatgtttttcgatgggaccgtttgcgggggttttaatcgaattgatcaaggtgatcctaaatgttgcaatcaaaggaacgatgacgatggggatcggagatgcagcaaatttcctgattggatgtgcattctgcgttccagcggcgctgatctatcagaaaaagcgtacgaagagtggagcggtgacggggatggtagttggaactgtgatcatgactattctcggatgtgttctgaatgcttatattttgcttccggtgtatgcaaaagcatttgagatgcccttggatgctctggtatcgatgggcacagaggtaaatggtgcgatcactggtctgatgacctttgtcctttttgcagtggcaccgtttaatttgctgaaagggattttggtatctttgatcgtattttttgtctataagaaaatccggcaagtgttattgtaaggaaaagggtggtatgttataattttataacataccattttgcgtatgagacagaaaaagtaatggagggattaagcaatgtcagtgaaaatggatgttcagatgacaccgagagcaatgtatgactttttgctgtatcacacatacagccatctcagtgggctgatcggagcgatttttggagttgttgtacttggacttggaatccgggcgatggcacaaggagattataccgcaggtatgatgtttttcttttttgccgcagtttttcttgttatgacacctctcacactgaagtcaaaggcgaaggcgcaggtaaagacaacgccgatgttccaaaagccaatcacatatgagttgaccgaagaaggaatcactatttcccaggaagatcagcagacagaggtgaaatgggaagaatttcagaaggcagtttctacgaaccggacattgattctttatatcacgcgggtacgtgcgcttgtttttccgaaggaagcgctaggagagcagtatacagcagctgtgcagatgatctcaacacatatggcgccggcgaaagtgaagatccgtcaggtacggtaagagggaaaaggaaggaaaactatggtaatagagacaagaagtccgaaggagacgtttgagtttgggaaaaaaattggagaactggcaaaagcaggcgagatctatacactgattggcgatctgggcgtggggaagactgtatttacgcagggattggcaagagggcttcagattgaagaggcgattagcagcccgacattcacaatcgtacaggtatatgaggagggaaggcttccgttttatcattttgacgtatatcggattggggatattgaggaaatggaagagatcggatatgaagattacttctatggtcagggagtatctctgattgagtggtcaaatctgattgaagagatcttgccacagagacggacagagattactattgagaaagatctggatcaagggtttgatttccgacggattacggtaagagaacttggagtataggaacgagagaaaaaagaagttggaaaagaggttgcgttagaaatagtgacctttctaaaacagatgatagacaatgaaaaagaaagaagtgaaactatgcggatattggcattagacagttctggtttggtggcgtcagtggcagttgtagaggaagaacagacaattgcggaatacacagtgaattataagaagactcattcacagacgctgcttccaatgctggatgaaatcgtaaaaatgacagagatgaaccttggtgagattgatgcaatcgcagtggcgggaggacctgggtcctttaccgggctgcgaattggatcggcgacggcgaaaggacttggactcgcgctaaaaaagccgttgatccatattcctacggtggatggacttgcttataacttatatggaaatgaaggggtgatctgcccaatcatggatgcaaggagaaatcaggtttataccggaatttatcgtttccgggaggagtttgtagtagaagagccgcagatggcgatagaaatatcagctcttgcagagaaattgaatgaacgaggagagcaggtgacatttttaggggacggtgttccggtatacaaagaacagttagagcaacttttgcatgttccggtaagatttgccccatctcatatgaatcggcagcgggcagcagctgttgggacacttgcagttcagtattggaaagaaggaaagatagaacgtgcggaggatcatcagccggattatcttagaatgtcacaggcagaacgcgagcgtttagagcgagaagagaaggagcagcagggaaaatgatcattcgaggaatgaaagaatccgacatcatgccgctatatgagctggaggagcaatgtttttgcccatccgatcggtggagtatggcggacattagaaaggcatatgagctggagcatttttttgtccttgtggcagaagaagcagaggagatctgcggatattgcattgtctatgcggtgatggatagtgcggatattgggaaaatagcggtggctcccaaagcgcgtggaaaaggaattgcaggaaatttgttggaacatttatggaaagtttgtgctgagagaggaatcaaggatgtgattcttgaagtgcgggcaagcaatgatgctgcgaggtgcctgtatacaaagtatggattcgagacgatttccctgcggaaggattattataaagaacctatggaacatggattgactatgcaaaagaacctatctgaataggggttggggcattgtaagaacatggaaaaaaaggaaacagttcccgctaggaatctgttttaaaaatcaatataataaaggcgtgacaacaagaaaaaagaaggatttttcataggaggaattgtatgcgccaatataaaaaagttgagacgacggaattagataaagtattttgcaacaaatgtggaaaagaaattctcagagaggcagatttcctccatgtagagaagcgctggggatatttctcgggaaaagataacgaagtacacgagtttgatctctgcgaagagtgttacgatgcatggatttcagacttttcgattccggtagagaagaaataatagaaggagaatcacatgttagatgtttgtcttctcggaacgggcgggatgatgccactgccttatcggtggctgactgctctgatgacgagatttaatggaagtagtctgctgatcgactgtggagaagggacgcagattgcgatcaaagagaaaggctggagctttaagccgattgatgtgatttgttttactcattatcacggagatcacatcagtggactgccggggcttttgcttacaatgggaaatgcagacagaagagaaccgttgacgttaataggaccgaaagggcttgagcgtgttgtgagcgctcttcgcgtcattgcgccggaacttccatttccgatcatatacaaagaaattgaaggaccagagcagacttttgaattaaatggatatcgtctgaaagcgtttcgtgtcaatcataatgtgctttgttacgggtatacactggagattgaccgtgctggaaaatttgatgtaacaagagcgatgggtcatgcgattccaaagcaatattggaagcatttgcaaaaaggtgagacgattgagcatgaaggaaatgtatttaccccggatatggtgctgggtgctccgcgccgtggaatcaaacttacctatacgacagatacaaggccgacagactcgattcgtgtgaatgcgaaacattccgatctgtttatttgtgaaggaatgtacggggagaaagaaaaggcatgcaaggcggtagaatataagcatatgacattttacgaagcggcgcagcttgcaaaagaggccgaggtaaaggaaatgtggctgacacattacagtccgtctctgacgcgcccggaattttttatagaggaagtgcaaaaaatttttccgcaggcaaaagccggcagcgacagtatgtctgtggaactggattttccagaagaggagtaagaagatgaaagaaaaagaaatcacaatactggcaatagaaagttcttgtgatgagacagcggcagcagtcgtgcggggaggaagagagatcctctccaacgtcatttcatcacagattgaattacataaattatatggaggggttgttccggagattgcctccagaaagcatattgagaagatcaatcaggtgattgaggaggcgttgaaagaagcaggggtaacattggatgaaatcgatgcaatcggagtcacttatggaccggggcttgtaggagcgttgcttgtcggggttgcagaggctaaggcgattgcatatgcaaaaggacttcctttggtgggagtacatcatatcgagggacatatttctgcaaattatattgaaaataaagacttagagcctccatttgtatgtcttgtagtatcgggaggacatacacatctggttcgtgtgaaagattatggaacttatgaaattatcggaagaacaagagacgatgccgcgggcgaagcatttgataaagtggcgcgggcaattgggcttggatatccgggtggaccgaagatagataagttgtctaaggagggaaatccggaagcgattgtctttccgaaagcacatatgagtgattcgccgtatgattttagtttcagtggtgtgaaatcggcggtattgaattatatcaatggctgtcagatgaaaggggaaagttattctcaggcggacatcgcagcatctttccagaaagcggtgacagatgtacttgtagaaaatgcgatgaaagcagtggatgagtttggattaaaaaaatttgcgattgctggtggggtagcatcgaatagcgccctcagagctgcgatgcaggaagcgtgtgataagaaaggagtcaaattctatcatccatcaccaatttactgcacggacaatgcagcaatgataggagttgcagcttattatgagtacctggcgggaacaagacatggatgggatctaaatgctgtgccgaatttgaaactgggagaacggtagactctggttatcagtagggaaaagagattcgggaaaggatgtgcaatgccagatggagcagaaaaaggacaaacgagaaaaaaaatgtatggcgatcgtgttggcagccgggagtggaagccggatgggggcggcgattcagaagcagtatttagaattagaaggaaagccggtgttgtattattgcttgcatgtattccaggagtccagatatattgatgagatcgttcttgtcacaggagaacgtgaaatagactattgcagagaaaagattgtacaacaatatggttttgacaaggtggtacagatagtggcgggagggaaagaacgctatgagtctgtgtactatggattaaaatatgtggaagatggaattgtgttcatccatgatggggcaagaccgtttgtggatgaagaaatgttagagcgggcatacgaatgtgttttgagagatcaggcgtgtgtcgtaggtatgcctgtgaaagatacaattaaaattgcagatcagaatcagtatgctgttcagacgccggacagggcatatgtctggcaagtgcagacacctcaggtatttgatgcaaaactggtgcgtgctgcttatgaaaaattaatccagagtggatgggagaaggcgacagatgatgcgatggttgttgaaagaatgacagaacatccagtcaagcttgttttcggttcttatgaaaatataaaaattacaacgccagaagatctggaaattgcaggtctttttatcaggaggcaccgtgcatagagagaatctttcgctggcagtagtattttcataattttaaaacctttcgtttgtcataggctcctcccactacctttaggtggtgggaggagccttgttgattgttgttaaatatgctacactgactgtagcagttcttaaagagaaaaccgttcgatgtgctgctcatcaaggcactcttttgtacattgacaagatatgaggttgcaatacgaaattcgtgtactgcgtaaaatcttaatcgtaaagacattattactgtatggcatgggaagtttagtacctgatacagttacagatgagcatatcttatccgtaaagggtgttgtcaaccaccctatgatgtaacgccactttagatagcaatatcttttggggttaaaagtcggagacgtatgtcgttcgtacgactgggcagttacaagcccatgacctttaggtcgtgggtagttgacgtagcgaggatccggttggacaatggtttattacttacttccaggcgatttttagatataaaaatgatacctgaaatcgccggaagagcagcgagattaaaggttcatgttagcagaaaaattcccgaaaaataaaaaaataaaaaaagtttagaaaaagtgttgacagttggaaatatccgtgatagaatacatcttgtcttcaagagatgacaaaaacttaataaatgcagaggtatcgaagtggtcataacgaggcggtcttgaaaaccgtttgtccgaaagggcgcgtgggttcgaatcccaccctctgcgttaggaaaaccaccaatcaatcatcggtggttttcttatgccaaaagaacgaaaggcgttttggagaaatacccaagtggctgaaggggctcccctggaaagggagtagatcgttaatagcggtgcgagggttcaaatccctctttctccgtttaccataaagtatcaacagatcgatgacatggtgaaagattgacaagtgaagatggtatgaagttgaaatgttgaaaataaaaacagttgacaagtactgttggaaatgttaatatagaaagcactcaatagtgtgacaggaaagcaacaaaaagcatcggagatatggaatcgaaaaaaaggctatgaaagtagaaaagaaaagatttgaaaaaagatgaaaaaagttgttgacaaagataaaaagatgtgataatctaatatagctgtcgcaagagagcgaaacaaacagaacattgataattaaacaatagacaacacaaccctgaaaatttcgaacaaatgagaaaatttcagaacagacagaaatgtcaacctaaaaacagtaaaagggataggattgctagtagtgattcttgactggaaacaaacacttttaacgagagtttgatcctggctcaggatgaacgctggcggcgtgcttaacacatgcaagtcgaacgaagcgcttgaatggaattcttcggaaggaagctcaagtgactgagtggcggacgggtgagtaacgcgtgggtaacctgcctcatacagggggataacagttagaaatgactgctaataccgcataagcacacgtgatcgcatgatcgagtgtgaaaaactccggtggtatgagatggacccgcgtctgattagctagttggtggggtaatggcccaccaaggcgacgatcagtagccggcctgagagggtgaacggccacattgggactgagacacggcccaaactcctacgggaggcagcagtggggaatattgcacaatgggggaaaccctgatgcagcgacgccgcgtgaaggatgaagtatttcggtatgtaaacttctatcagcagggaagaaaatgacggtacctgactaagaagccccggctaactacgtgccagcagccgcggtaatacgtagggggcaagcgttatccggatttactgggtgtaaagggagcgtagacggcagtgcaagtctgaagtgaaagcccggggctcaaccccgggactgctttggaaactgtgcagctagagtgtcggagaggcaagcggaattcctagtgtagcggtgaaatgcgtagatattaggaggaacaccagtggcgaaggcggcttgctggacgatgactgacgttgaggctcgaaagcgtggggagcaaacaggattagataccctggtagtccacgccgtaaacgatgactactaggtgtcggggagcaaagctcttcggtgccgcagccaacgcaataagtagtccacctggggagtacgttcgcaagaatgaaactcaaaggaattgacggggacccgcacaagcggtggagcatgtggtttaattcgaagcaacgcgaagaaccttacctgctcttgacatccctctgaccggcaagtaatgttgcctttccttcgggacagaggagacaggtggtgcatggttgtcgtcagctcgtgtcgtgagatgttgggttaagtcccgcaacgagcgcaacccctatcttcagtagccagcggcaaggccgggcactctggagagactgccagggataacctggaggaaggtggggatgacgtcaaatcatcatgccccttatgagcagggctacacacgtgctacaatggcgtaaacaaagggaagcagagtcgtgaggccgagcaaatcccaaaaataacgtctcagttcggattgtagtctgcaactcgactacatgaagctggaatcgctagtaatcgcgaatcagaatgtcgcggtgaatacgttcccgggtcttgtacacaccgcccgtcacaccatgggagtcagtaacgcccgaagtcagtgacccaaccgcaaggagggagctgccgaaggtgggaccgataactggggtgaagtcgtaacaaggtagccgtatcggaaggtgcggctggatcacctcctttctaaggaagaaagaagtaaggattgaaaaaagtctattgtttagttatgagtgttctgaaaagaacgaaaagcttctggtggcgatgcgctgaggggaaacacccgtacccatcccgaacacgatggttaagacctcagcggccgatggtactgcactggagacggtgtgggagagcaggtggctgccagatttataaaaaagatactggatttaccagtgatcagaaaactgaaaagatttagctttctgatgactgataaaacagtcaatatgtaccttgaaaatcgcatacagaaatgaaatgataagaaaaatatcaagacatccgaggtgatcatggaagcttgcaagagcagaaatgagaactgattcgagaaaacgaataaaaacaacaaactattgccaacgcatatcacgctagatatgtgtagcggagtccatacccgtggacgaagcaagttggttatgctagaaagagcgtatggtggatgccttggcactaagagccgatgaaagacgtgataagctgcgaaaagcttcggggaggagcaaatatccaatgatccggagatatctgaatggggaaacccggcggagcaaacctccgtcatcttaacgccaatacataacgttaagaagggaacccggtgaactgaaacatctaagtagccggaggaagagaaagaaacatcgattctgtgagtagcggcgagcgaaagcggaagagcccaaaccgggatgcgtgcattccggggttcggactgcgtaagtgatgagtgagcctagtagaatggttttgggaaagccagccagagagggtgaaagccccgtacatgaaaggcgagcgagcacggcaggatccagagtaccacgagacacgagaaaccttgtgggaatgagcggggaccaccccgtaaggctaaatactccttagtgaccgatagcgcatagtactgtgaaggaaaggtgaaaaggaccccgggaggggagtgaaagagaacctgaaaccatatgtttacaagctgtggaacatctttatatgatgaaccgcgtactttttgtagaacggtccggcgagttacgctggctggcgaggttaaggactgaaggtctggagccgaagggaaaccaagtctgaatagggcgtgaagtcagtcagagtagacccgaaaccgggtgatctatccatgtccaggttgaagttgccgtaaaaggcaatggaggaccgaacccacatccgttgaaaagggtggggatgaggtgtggataggggagaaattccaatcgaacccggagatagctggttctcctcgaaatagctttagggctagcctcatacgagtcttgcggaggtagagcactgaatttcctagggggcgtcaaagcttaccgaagaatatcaaactccgaatgccgcgtagatgatgtatgggagtcagactatacgagataagttggatagtcgaaagggaaagagcccagaccaccagctaaggtcccaaaatgtgtgttaagtggaaaaggatgtgggatttcgaagacaactaggatgttggctcagaagcagccatacattcaaagagtgcgtaatagctcactagtcgagaggtcctgcgccgaaaatgtccggggctgaaacacactaccgaagctgtggaattgatctgatcaattggtagaggagcattcttaaagggaagaagctgtaccggaaggagcagtggacttttaagaagagagaatgccggaatgagtagcgagaggaaggtgggaatccttccggccgaatatctaaggtttccagagtaaagctgatctgctctgggtaagtcggggcctaaggcgaggtcgaaagacgtagtcgatggacaacaggttgaaattcctgtactatgatataacagaactgtggggacacgtgtggagagcgggagccgggaatggaaagcccggtgcaagcgaggtaggagagaagttggcaaatccgcttctcaatctgaagacgtgatgcggaccgaactgagagtagggaagcccgtgagccatgcgtcaagaaaagccgctattgtttatatcatacccgtaccgtaaaccgacacaggtggatgaggagagaatcctaaggccgacgggagaagcattgttaaggaactcggcaaaatgactccgtaacttcgggagaaggagtgccagtgagaactggccgcagagaattggcccaagcaactgtttagcaaaaacacaggtctatgcaaaaccgaaaggtgaagtatatgggctgacgcctgcccggtgctggaaggttaaggggagaggttagcgtaagcgaagctttgaacttaagccccagtaaacggcggccgtaactataacggtcctaaggtagcgaaattccttgtcgggtaagttccgacccgcacgaaaggcgtaatgatttgggcactgtctcgacaatgcacccggtgaaattgaaataccagtgaagatgctggttacctgcgccaggacggaaagaccccatggagctttactccagcttgatactgggattcggtattgcatgtacaggataggtgggagactgagaagtatttacgccagtagatacagagtcgctgttgggataccacccttgcagtactgggtttctaaccagcagccgtgacccggctgggggacaatgtcaggtggggagtttgactggggcggtcgcctccgaaagggtatcggaggcgctcaaaggttccctcagaatggtcggaaaccattcaaagagtgcaaaggcagaagggagcttgactgcgacaccgacgggtggagcaggtacgaaagtaggacttagtgatccggtggtataaagtgggattgccatcgctcaacggataaaagctaccctggggataacaggcttatcactcccaagagttcacatcgacggagtggtttggcacctcgatgtcggctcatcgcatcctggggctgaagtaggtcccaagggttgggctgttcgcccattaaagcggtacgcgagctgggttcagaacgtcgtgagacagttcggtccctatccggcgtgggcgtaggatatttgagaggagctgcccttagtacgagaggaccggggtggactggccgctggtgtatctgttgcactgccaagtgcatggcagagtagccaagccgggacgggataaacgctgaaggcatctaagcgtgaagcccccctcaagatgagatatcccaacgcaagttgtaagaccccttgaagacgacgaggtagataggacagaggtggaagtgcagtaatgtatggagctgactgttactaatcggtcgagggcataaccaagtggtgataggagaatggatggaagagaaaaacttagaaaagtagttgactgtatgtgattttgaaggtatatgaataatatataggggattggtcaaatggtatgataggagtctccaaaacttttggtgggagttcgattctctcatcccctgctttgaaaagccttaagaacagcgtagaattgttgttttaaggctttttttattttaaattttaaagagtagtaatccctgcaggatgaatgtatggaacacagttctaatgaaatagctgcacgataactctatactttttaaacgattcaacaaccaaaagaatttcccttagtgctttttctttaggaacatagaaatcagcatcgccaagatccctaagaataaatagaccaatgcatataaaagaaatgccttttcacctatatccaaaaacaaccatgtaccagccaaaaagaataacgctgtaagaattggtgatgcccataatttttttatgtctttaccagcatatactccggcacaaattgcgtaaatagggttcaatgcaaaaagtagaataaggcaagttgccattccgctgtcatcttctagaaaggtaaccgcaagacaaggcaatcccaacataattccccctgatgctagtatccaaggtaaaaatttcttcatgtgcgcaagctcctttaccaattcaatcttcttatagtttttagttcctatcaaaacgtgtcaattccaatgttgtaaaccgctatgtatcaaattctaaaagatacattatatccgtatctaaatcatatagtgctaaagaaaaattgaaggaacctctaaatatattcgtgtcatctttagtatctttgctgtttgcatatctatcataaaaataataatatccattcttaatttcaggaatatttgaagcatcagccagattataattataaaaatgatcttctttttcacctccatacattaaaagctgaagattctctgtcaatggaaggatttcccattcctttgtatattccaatgctttttctttattttcagagcaatctaatattagaacgtaatctccatctccatgaaaacctctgtgactatctgtttcttttaaaaccttaaactcttttttattaaagccaaaggtatctttaatgaaatgattccgttttgcttttaatatgtaatcaaataaaaatgggctacttaaagtgatgatcaccaacaatacaacaactagtttccagcgtttcatagaacatctcctttcctttcttttgtcatcgtatttactatgtttcgtttttcacagtatatcatatttttctacaaacatttcttaatattttttatttttgctttcagaagctcaaatgtgtaattactctgcctataaatacttagcagagtaccacgcccatagcatacttcgcatgagcgtgggtgaatgcggttaatttttgcttcctcggttttgaatgcatttttgtacaatcattctggtattatcaccgatgtttcttggtgctccacaaatgccacattacaaaaagaaaggatctgtatccgggttacattttacaaatcaagattgtgtaattcgcgacaacaatggcaaatgctatttgaagtttccacattttcatggcgactaccttccaattggttatgtaagtggctctttgaaagaggtacgtgtaagaccttattatagtgatttccttgtaatctgtgtttatgaaactgagtcaacagaaccattaccagaaaacggtaatgtttgcggcattgattttggaatttcaaacatcgtagctctcgtaagcaatacacaaaagtgcatgcgctacaaaggcggtgcattaaaagcacaaaatcaatggtataataagcaacgttcgtactatcagtccattgcgatgcaaggacacgaggcaaaagaagcaaaacaaccgggggtgttgaataccaggcgtatggaacaattgaatcgtaaaaggaatcaattctttcatgatgcattgcataaaattgcatctgatgttgtaaaattttgcctcgaaaatgatatacgagctatcgtacttggtaaaaataagaattggaaacaaaactgtaatctgggacaccacaataaccagatttttgttcaaatgcctatcgcaacgcttagttattgcatcaaatacaaagcagaagagaatggcttatttgtaatggaacaagaagaatcttacacaccaaaagcaagtcttgttgatggagataaaatcccagttgttggtgatcaggaaaaaccttctttttcaggtaagcgtgttagtggtagactatattgcacgaaagaacagatgctcattaatgccgacttaaatggtgccggcaatattttaagaaaagcatatccaacagcttttgaaggtataacagattatcacttcctaaataaaatgattgtaaaaaaatgcaataccatgtattccagaaatggatagcagccctcatgagcgggcttgtatttgcgcaagcggtacgaaaccacttccattttttgttagagaaaatgcaagtggtagttcataaaatttaaattacaatatatccctataagagctgtttttgtattgtgccgacttgacattccccacagctaaagcaaggggtctacgacacattggataatcgtcgtcaccagacaacaagcctatcacacgattctcttcttataccttcacagtcaaaaaaataattaaatatttaattaaattttcggtgaaaaatattaaaaaaatataaatagtacgaatggatattgacattttttgtatagaaaaataaaatattaattaaacaattaactaatttagaaaggagagacagaatgggagagagtacacagttattgatgtgtcatgtgatgcacctgtatttgcagagaagcatttgtctgtttaaggagttagatatacatccgggacaggcgggacttttgtgggcgttgaattgcaaagatcaagatcacagaggtatggcacaaaaggaactggcaaaacatatcggtgtaaagcctccttcgattaccgtaatgttaaagaagttggaagcagaagcgtatatagagaagaagcaggatgaaaatgatcagaggatcatgagaatttttcttacggagaaaggaaagaatattgcggcaaagatggaaactgtgatggagcagttggaacaggaagcgtttgcaaatatgaatgagcaggaagtaatgctttttcgcagactcttgcttcagatgagagacaacttaaagagtgcaggcagaaaggaagattaaaatgggaaaattatttaaatttatgaagccgtatgcagcaaccattctgatgattgttgtgtttcttgtacttcaggcttactgtgacctgtcgttgccgggatatacatcagacattgtaaatgtcggtatccagcagggcggaattgacacggcgataccagaacagatttctgtggaagatatggacagattatttttgtttgtttctgagcaggaccagaagacggttctagacgcgtatgaaagagatacagatacttatgagtctgaggcatatgtgctgaaggatggaattttgaagaatgagaagagaacagataaaatcggggcaatcttaagtaaaccgatgatgcttgtgactgtgttttcatcagacagtgaggagacaaaggaaatgacagatgcgatgtttgccagtctcccaaaagaaatgttaagcgaagacatgacagtttttgatgtgcttggcatgatgccagaagaacagcgggcgcagatggtgactcagattggagagaaggtcgatgagatgccggagatgatgttggaacaggcggcgaccatttatctcaaagaagcatataaaaacttgggaatggatacggataagattcagactggttatatgttgcgcacaggaggaaaaatgctggcgcttgctgcgggtggaatgattgtgagtatgatcgttggattcctggcatccaaagtaggtgcttcgacagggcgagatctgcgaggaaaagtattccgtaaggtggtagaattttcaaatggagaatttgacaagttttcaactgcatcattgattacgagaagcacaaatgatatacagcagattcagatgctgacggtgatgattttgcgaatggtactttatgcaccgatcatgggaattggaggtgtattcaaagtattccatacgaatgtgtctatgtcttggatcatcgggcttgcagttgtcctgattgcgatggtcgtaatggtcttatttgttgtagcaatgccgaaatttaagatcttgcaaaatctggtagaccgattaaatcttgttacaagagaaattcttactggattgcctgttatccgtgcgttcagtacagaaaagcatgaggaagagcgatttgatcaggcaaacaaagatttgacaaagacaaacttatttgtcaatcgtgctatgacctttatgatgccgacgatgatgctgatcatgaatgcaatctcaatcctgattgtatgggtaggtgcaaatggaattaacgatggtcagatgcaagttggagatatgatggcatttattcaatatacaatgcagattattatggcattcttaatgatctgtatgatctcaatcatgcttccgagagcggcggtttctgcaacgcgtgtggatgaagtgttgacaagtacaacgctgatcaatgatccgaagcagccgaaacatctgaaagaaggcaaggggatggtagaatttaaccacgtatcgttccggtatccgggtgcggaggaagatgtgctgcatgatatttcctttacagcaaaaccgggtgagacgacagcgatcatcggaagtaccggaagtggtaaatctacaatggtaaatctgattccaagattttatgatgtgacagaaggaaaaattacgattgatggggaagatatccgaaatgtaacacagcatgagttgagagaccagcttggctatgtgccgcagaaaggagttctgttctcaggaaccattgcaagcaacattttgtatgggaatccagatggaagtgaagagacgatgatggaggctgcaaaagtggctcaggcagcagaattcattgaggagaagccaaaatgttacgacagcagaatctcccaggggggaggaaatgtttctggtggacagaaacaacgtttatcgattgcaagggcaattgcgaaagatccaaagatatttatttttgacgatagtttttctgctttggactataagaccgatgtgacattgcggaaagcattaaaagaacatactgtgaacagcacagtcatcattgttgcacaaagaatcagcacgatcctccatgcagatcagattattgttctggatgaaggaaaggttgcgggaattggaacgcacaaagaattgctgaaaaattgtgatgtatattatcagattgcggcatctcagttatcggaaaaagaactggaacgagatcttaatcaggatgaacaggaagggggcagataggcatgagtaaaggacaaagacatggtggtggccatatgggcggcatgcgagccggagagaaagcaaaagatttcaaaggcacaatgaagaaactcctgaaatatatgagcgcatataagttgggaatatttgcagtgatgctttttgcagtcggaagtacgatattcactatcgtaggaccgaagattcttggaaaagccacaacagaaatctttcatggacttgtaagcaaagtgtcaggtggaagtggaattgattttgacaaaattacgcaaatccttctgtttctgttaggattgtatgtgttgagtgcgctgttctcctttattcagggatttattatgacaggagtgtcccagaagctgacttacaaactcagaaaagaaatttctgagaagatcaaccgtatgccgatgaattattttgatacaaagacgcacggcgaggtgctttccagagttaccaatgacgtggatacattaagtcagagtttgaaccagagtgcgacacagatcattacttcttttacgacgatcataggtattttggttatgatgctcagcatcagtcctctgatgactgttgtagcattgttaattcttccggtgtcaatgctcctgatttccacgattgtaaagaaatcacagaaacacttcaagaatcaacaagagtatttgggacatgtcaacggacaggtagaggaggtctatggaggccacagcattgtcagagcatttaacaaggaagatgatgtcatccgggagtttactgagacaaatgaaattttatatcagtctgcatggaaatctcagtttttctcggggatgatgatgccgatcatgcagtttattggaaatcttggatatgtggcagtagcaattttaggtggatatctggcaatcaaagatgcgattgaagtcggagatatccagtcctttatccaatatgtaagaagttttacgcagccaatcacacaggtggcacaggtggccaatatgttacagtctacagcggcagcttctgagagagtttttgaatttttggaagaagaggaagaagaccagtttgcagagcatccggtttccgtagagggattgaagggagatgtagaatttaaacatgttcattttggatataatgaagatcgtataattatcaatgacttctctgcaaaggtgaaggaaggacagaaaattgccattgtaggaccgaccggagcaggaaagacaacaatgatcaaacttctgatgagattttacgatgtcaacagtggagaaattttgatcgatggacataatctgaaagattttaacagaagtgaacttcgacagatgtttggaatggtgctgcaagatacatggctgttccatggatcgatcaaagacaatatccgctatggaaagcttgatgcgaccgatgaagaagtcgtagaggcagcaaaggcagcatatgtacaccggtttgtgcagacccttccagatggatatgatatggagttgaatgaggaagcaagcaatgtatcacagggacaaaagcagctgcttacgatcgcaagagcgattctggcagatccaaagattttgatcttagacgaggcgactagctcagtggatacaagaacggaaatcaggatccagaaagctatggataatctgatgaagggcagaacaagttttatcatcgcgcatagattgtctacaatccgtgatgcggatttgatccttgttatgaaggatggagatatcgtagagcagggaaatcatgaagagctgttggaaaaaggtggattttatgcaaatctctataattctcagtttgagcagacaggtgcatagaactatttcggataattgcagagaacagagttggagagtaatgataaacagatactaaaaagaaaataaaaaagacccgtacggtaagagagaaatccttgaaaatctgatttttaggaatcttaccgtacgggttttatttattgttcagaattaatgataaagttttttgttctcatattttgcttcagaagtcagctggatggaaagctttttgaattgcttgacgtcaacttcggagagcattacggatgtatgaacctgacagcctcttaattttggaatctgatctaaggcaagctgtgcggtttcatttgttgcggcgctgatggaaagtgcaatcagaacttcatcagtatgaaggcgcggatttttacttcccagataggaagttttcagtttttggatcggttcgatagcagatggagaaatgatgtgcacttcatcctcaatgccggcgagcttcttcagagcatttaaaagtaatgcagcagatgctccgagaaggttgcttgtttttccggtaatgatacttccatcaggaagttctaaagcggcagcaggagcacctgtctcttcagcacgcttcagtgcggcatctacaacggtacggtcattgactgtaatatgcgcctgtttcatcagaagttcaatcttaaatacttcttcttcggtggaagttccttctgcgagcccattcaatgcctgatagtagcggcggataatttcctgattggatgcatcacgacacgcttcatcgtcacagatacagtttccggccatatttacacccatatctgtcggggatttgtaagggttttctccatatattttttcgaaaatagcactgagcaccgggaaaatttccacatcacgattataattgacagttgtaatgccgtaggcttccagatggaatgggtcgatcatattgacgtcatttaaatcagcggtagcagcctcataggcaagattgaccggatgttttaaaggaatgttccagatagggaacgtctcaaattttgcatatccggcgcggacaccacgcttatgctcatgatagagctgagagagacaggttgccatcttcccgcttccaggtccaggagctgtgatgattacaagtggtctggaagtctcgatgtaatcgttctttccataaccttcgtcactgacgatcagcggaatgttagaagggtaaccttcgatcacatagtggatatatacacggatgccaagcttctccagtcttgttttaaacagattggcgctgctctgaccggtatactgagtgatcacaacactgccgacaaagagtccttgctcgcggaaagattcaatcagacggagtacatctgagtcgtaggtgattccgagatctccgcggactttatttttttcgatgtcaccggcactgatgacaatgacaatttcggcctgatcggataactgcataagcagtttcagcttgctgtccggtgcgaatcccggaagtactctggaggcatgatagtcgtcaaataatttcccaccgaattccagatacaatttgttgtcaaattgatcaattctttttctgatatgttctgactgcatggtcagatacttatcgttgtcaaatccaattttcatagcgcattcagtcctttatctcattcttatattataatgttactaaaaaagttgtatataataaacatacgtcaatagtatactataaaacaattgtgttttgcaaggagaaaaatttcccaatgggaaacaggaggtgcaatggggaaattcacaaaagttttagaaatgcggtgctgatttcacaatgtttttattgatttatgaggagaccatacttataataaaagagatgataattaggaggaaaagaatggacaaccaaaacaaaaataaccagaagaacaacaaacagggctttgggattattataattacaacattgattgcggcggtcattgtgcttggcctttatcagtttatggaagaaagcacatcaaaggagattgcgtacagtgaatttctgaagatggtagatgacggtaaagtagaagaagttcggatcggcgccaatgagcttataattactccgaaagaggagaaagttccagggctgaaagtaaaatattttactggaaaagtagaagatgagaatctttcacagcgtctctatgaagcgggcgttaagtatggggcagagattccagattcgacttcagcgatgctttttaatattctgatcagtattgtacttccattcgcatttatttggatcggtttgagtttcctgatgcgtcggatgtccaagagcggcggaatgatgggcattggaaagagtaatgcaaagatgtatgtagagaaggaaaccggagttaccttccgtgatgtagcaggagaagatgaggcgaaagaatcacttcaggaagtggtggattttcttcataatccaggcaaatataccggaatcggtgcaaagcttccaaaaggagcgcttcttgtaggacctccgggaaccggtaagacattgcttgcaaaagccgttgcgggagaagcaaaagtaccgttcttctctctgtcaggttctgcatttgtagagatgtatgtcggtgtaggtgcatcgagagtgcgagatttattcaaagaagctcaggcgatggctccgtgtattattttcatcgatgagattgatgcgatcggtaagagcagagataatgcgatgggaagcaatgatgagcgagaacagactttaaaccagcttcttgcagagatggatggatttgacacggacaaaggtctgctgattcttgcagcgacaaaccgtccggagatccttgatccggcgctattaaggccgggacgttttgatagacggatcatcgtagataagccggatctgaaaggacgtgtggacattttgaaagttcatgcaaaggacgtcaaaatggatgagacagtcgatttggaagcaattgcactggcaacatcaggggcagtcggttcagatcttgcaaacatgatcaatgaggctgcgatcaatgcagtcaagcatggaagaaaagtggtatcgcaggaagatctgtttgaagcagtagaagtagttcttgtcggaaaagagaagaaagaccgtatcatgaatgcggaggagagaagaatcgtttcatatcatgaagtaggtcatgcgcttgtcagtgcacttcagaaagatgcagagccggtacagaagattacgattgtaccaagaacgatgggagcgcttggatatgttatgcatacaccagaggaagaaaagttcttaaatacaaagaaggagctggaggcaatgctcgttggtatgctcgggggaagagctgcggaagagattgtatttgatacagttacaactggggcttccaacgatatcgagaaggcgacacaggtggccagagcgatgatcactcagtatggtatgtcagagaagtttggtctgatcggtctggagtctattcaaaacagatacttggacggacgtccggttatgaattgtggtgaggcgacagcagcagagattgatacagaagttatgagaattctgaaagaagcttatgctgaggcaaagagacttttatctgagaatcgcagggcgctggatgaaattgcagcattcttgattgaaaaagagacgattaccggaaaagaattcatggagatttttcacaaagttcagggaatcgaggacggtactcaggaaaaagaggctagaatctcaatgaaggaagtttccgcagcagatgtggcacaagaggatgtcacggaagaaaacgaagcagaaagaaatactctacaagagagtgccgcacaagaggatgctgcacaggagagcgggcaggaccactaatataaaaaaataaagagtatctgatattgctaataatggtcagtgaaaatagaaatcataagttcacagggaaaacagctatggatcagatgtggtggaaaagaggagtgcctttcggcactcctcttgcgttaaaaacattttgtggaatcaaaatcatatgcgtttattcgatatatgcaactgtagggaaagagatgaaattagggagaaaataatgtttaatatagaagaggaattaaaaaagcttccatcaaaaccgggagtctatctgatgcatgatgagaaagatgatattatttatgtgggaaaagcaatcagcctaaagaatcgtgtacggcagtatttccaagcaagcaggaataaaggagtgaagattgagcagatggtcacacatatttcgcgctttgaatatattgtgacagattcggagctggaggcgcttgtactggaatgcaatctgatcaaggaacacagaccgaagtataatacgatgctgatggatgacaagacgtatccgtttattaaagtgacgatagaggaggcatatccgcggattctgtttgcaagagagatgaaaaaagataaggcgaagtatttcggaccatatacaagcgcaggagcagtgaaggatacgattgaactgctgagaaaactgtaccacataaggagctgtaaccgaaatttgccaaaagatatcggaaaagagcggccatgtctgaactatcacattaagcaatgctatgcaccgtgtcaaaattatattagtcagcaagcatatcgggaatcggtgcagaaagcagtagaatttctgagcggaaaatatgatcccatcctcaaagagcttcaagaaaagatggaatgtgcatcagaagcaatggaatttgagaaggcaatggaatatcgagatctgcttgccagtgtaaagcagattgcgcagaagcaaaagattacgaacagtgatggggaggataaagatattctcgcggtggcaacggaggatcgggatgcagtggtgcaagtgtttttcatccggggaggaagactgatcggaagagatcatttctatatgacgattgccgacagagagccgaaggcagagattcttacaagttttatcaaacagttttatgcggggacgccatatgtgccacgagagttgatgatccagcaggaaatcgaagaccaggaggtgctggaggaatggctgtctgagagaagagggcatcgggttcacattcgtgtgccgaaaaaaggggagaaggagaagctggtggaacttgcgaagaagaatgcacagcttgttttgagtacggataaggagcgcttaaagagggaagagggaagaacgatcggagcggtaaaagagattgaaaaatggctgggaattgcatctgtgaaacgaatcgaggcatttgatatatccaacacaaatggatttaattccgttggttctatgatcgtttatgagaaagggaaaccgaagcgaaacgattaccggaaatttaaaatcaaaggggtacagggtgcagatgactatgcaagtatgcgggaagtattgacgagaaggttcgaacatggaatgagggagagagaagaggggaagaaccacggaggcttccagacatttccagacttgatcatgatggacgggggaaaaggacaggtcaatattgcattagaagtgctggatcaactgggaattgtgataccggtatgtgggatggtgaaagatgatcatcataggacaagagggctatattacaataatgaagagattgggattgacagaaattcagaaggatttcgtctgatcacgaggattcaggatgaagcacaccggtttgcaatcgaatttcacagaaaactgagaagtcagggacaggtacattccattcttgacgatattccgggaatcgggccggcaagaaggaaagcgctgatgaagcattttatgagcctggatgcgatcaaagcggcaacgatagaggaattaaaagaaattccatctatgaatgaaaaatctgcaaatgaagtatacaactttttccattgatgatatactaaggagagaataagaatgaagaaggagagcattatgggaagcgtagagttacagaaagttgcagagaaaatgaatttaaaaaatctgactccgcaaataggtcttttaggaaaagaagtcaatgtgccggatattaaccgcccggcgctacagctcacaggcttttttgaacattttgaatccgatagagtacaagtggtaggatatgtagagtatacctatcttcaaaagctcagcgatgatagaaaggaagaagtataccagtcactattatcctatccagtgccttgtatcattttctgcagagatcttatgccagatcagagatttttggaaattgcggtcgaaaaagatgtgccgatttttctgacagacaagacgacatcttctttcatggcggagatcatccggtggctgaatgtggaactggccccgtgtatctccatccacggtgtgcttgtggatgtctacggtgtcggtgtgctgatcatgggcgagagcggaattggaaagagcgaggctgctctggaactgattaagagaggacaccgccttgtgacagatgatgtggttgagatccgaaaagtcagtgacgatacattggttggaactgctccggatatcacgagacattttattgaactgcgaggaattggtatcgtagatgttaagacgttgtttggtgttcagagtgtaaaagagacacagacgatagatcttgtgatcacactggaagactggaataaggacaaacagtatgaccggttaggattggaagaagagtatacagaattccttggcaaccgtgttgtatgtcattccatcccgattcgtccaggaagaaatcttgcgatcatagtagaatctgcatctgtaaatcatagacaaaaacagatgggatataatgcagcacaggaactgtacaggcgtgtgcaggagaatttgacaaagagaaaataggagacgagagaaatgaattattgctttggagtggacattggaggaacaacagtaaagttaggactatttgaattcaacgggacaatcgtggataagtgggagattaagacctatacagagaatgaaggtgcagcaattcttccggatgtagcaaaatcaattgcttccaaaatggaagaacatcagatgaagaaagagcagattcttggaattggtgtcggggtaccggctccggtggcagatggaattgtaaatggaagcgcaaatcttggatggaagtataaaaatgtgaaggcggagctggaagagctgactggaatcaaggtgaaggttggaaatgatgcaaatgtagctgcgcttggagaaatgtggaaaggcggaggccagggaaataaggatttgatcatggttacacttggaacgggagtcggaggaggaatcattgtcgacggacgtatcttagggggatttcatggagcaggcggagagattggtcatctctgtgtaaattatgaggagacagaagtgtgtggctgtggaggtcgtggatgtctggagcagtatgcatctgctacaggtgtagtaagacttgccaagaaaaggcttgcgaaaaatgatgatgagacaatattgcgcgaagaagaaattacggcaaaagctgtctttgatgcagttaaggcaaacgatgcagttgcaatggagattgccgaagagtttggacgctatcttggatatgcacttgccaatctggcaacagcagttgatccatcggtgatcgtgatcggtggaggggtatcgaaggcaggcgaagtacttctccagtatattgaaaaatattttcgtgagagaatgttctttgcaaatgcaaaggtgcagtttgctcttgcaaagcttggaaatgaagcaggtatctgcggagctgcaaaactgattttataaagtaaaagcttatatacgaaaagataacaaaaagaagacagaaatgaatgtgagtattagtaatatcatttctatcttcttttttgttcgtgtatagaaaattgattttgaaatccgggaatactattcctctggcgtgatagagccatccccctgatcaggtggggaggtttctccaccaccgtggtcttcgccatttccgttttcgttgccagttccactctcagatccattatttccatttccagaaccgttgtttccatttggatttccggaatttggattttctgggtcaggtgttactgtttcattgtcagttgattcgtcttctgactcgtcctcagcggaactgtctgagtgagtgttagtagaaggcatatagtagccttcgtgctttccatcacatctttgaccggaatctgttgcaacatattctgtcacttgtggacagctggacaacggcagctttccagaacttgcacagacggcagtcttttcaactgtgtcaggcatcacaaaatctttgtattctagaccttcgtgtactcgctccataatgctgttccacagtgtcaggtgccatgaagtattatccataggcttgttggagtcgtatccaccccagacagaagcagtgtagtatggagtatatccggagaaccagatatctacattatcggaagttgtaccagtcttaccggatactggcatattgctgagtgcagcaccggtaccggttccttttgtcacaacatctatcattgcatttgtcagcagtccggcagtagaagcctttacgacttgatgtgtctcggaagtgttatcaatcagtacatttccagaatgatcgagaatcttcgtatagaactttggttttgtgtaagttccgttatttgcaagggacgcataggcggcagtcatctcgaggttatagacaccgtgcgtgatacctccgagcgcagttgcctgctggatatcgctgaaagtctgtccgttgattacttcctgatctacaacagtggagaatccaaagctcttcaggtaatcaaatccagtctgttctccaatctcagtgagtgctttgactgcaacgacattcatagactgttcgatcgctttccttacagtcacccaacctttgtaggaaaaatcccagttattgacttcttttccgtttttatagcggtatggttcgtctttgatcgaggtgtgaagtcccattgcaccaatatcaagtgcaggggcataagttgatacaatcttaaaacaggaaccaggctgtcttgcagattccgtcgcacggttgagagaaaggctttccgtcttctcgccgcgtcctccgacgattgcttttacttccccggtgtattgatccataatcacaaaagaagcttgtggttgtggaacgatcgtctttttttccacctgagtgtctccttcgcgggagattgttgatttgtattcatcaatcgccgcctgagcaagttcaggggtagagaagacgagcggataagagtcatttcttgtctgacgcagatactgctcgagcatctctttgctgaagttttcgacagttccatcagagcgtgtgatcgtgagctgatagtcgatcaggccaaattctgtattgtacggatagttattcgggtttaaaaactcttcatcacagatttgctgaattcttgcatcctgagttgcgtagatggaaagaccaccgctgtaaagagcattataggcttgtgtctccgtatatcccagctttgtctgtaagtcggaaatgacttgtttagaaagctcatcgataaaataagtgtatggagtgtctgtggatgtatcggcatttgtaacctgaatccggtcataaacggaatcagccatggcagtatcgtactcttcctgggaaatatatttctgttctaacatgttgccgagaacaagtttgcgccgcttggcattttcttccgggttgactgtagggtcatatcttccaggattctgagtaatgccggcgatcacggtacattctgagagtgtcagctgcgatacgtctttgttgaagtagcgtttggcagcggattgaactccgagtgtgttctgtcctaggttgatcgtattcatataattttccagaatctcttctttgctcatctgcttttccaactccagagcaaggaactgttcctgaattttacgttcgacactgtctaagaatgtcttttcctgtgagaaattcggaaagacattattttttatcaattgctgggtaatcgtgctggcaccttcagaaaagtcaccgcttgtgatgccgacaagaccggcacgaagaattccttgcaggtcgattccgttatgcttgtaaaaacgttcatcttcgatcgctacaaaagcgtcctgaaggtcttccggtatttcgttgattgttttataaatacggttggaaccggaagtaacaaacttttctaattcctgtgaaccgtctgcgttataaacagttgtgaagtatccactcggtttgacagaagcaggagagatcttcggagctttgtcaagaattttcttcaagaacagaccgccgccaatcataccgatgataatgagcaagagaaaaacaattaaaaatcctttgaaaatccggacacctgctcgttttttcttcatctttgattttgaagatattttcttctgttttttgacagaatttcgttttccataattcatgaatggtttcctcctttatcaggtaattatatcaaatttatgtattgaaataaagcataaaataaaatcttcatatttcaaggcaaaaacttaagaaaaacttgtgaaaacagagttctgttgatatagtataaacagtttcagataaaatgtaattagaaaaagggtgatagtatatgttaagtaaatttcatacagtctatgaggggggagaagcagaaatcattgagaagaagtcccgcttcattgcgacagtacttccggtcacctgcgaggaagaggcgctggaatttatcgagtctatgaagaaaaaatattggaatgccactcataactgctatgcttacgtgatcggggagcgatttgagacacaaagatgcagtgatgacggagaaccgcaggggacagcagggaaaccgatgctcgatgtgttgctgggggaagagatacacaatacagcagtcgtagtgacaagatattttggaggtacgttacttggaaccggagggcttgtgagggcttattccggagcagtcaaagcaggattggaagccagtaagattattaccaaaaactgggggattaaactggaaatacagacagattataccggacttggcaaaatacagtatatccttggacagagggggattacggttctggattctgtctatgcagagaatgtgatgttgattgcgctcattcctgaagagatgaatcaggaggtgatagcagagatcacagaggggacaaacggacaagcaaagatgacacagaaggaaagctgctattttggaacagttgatggtgagatgaaagtgtttgatacagaataaaaatccctcccggtaatggaaagggatgtccattgccgggagggaaggaaatgtctactgaaattccggttcgatcaaaccgaaagtaccattctttctcttgtatacaacattgacttcttctgtctctgcgttgaagaatacgtagaaatcatgtccaagtaaatccatctggatacacgcatcctcagggaacattggtttgattccaaatcgttttgtacggatgatcttaatctcatcatcctctgaagaagtatcttctgattcaaaaaattcttgcttgaagttgctgccttcttgatttctggcaactaatttattcttatatttgcgaagctgtcgctcaatcacctcttctacgagatcaatcgatacatacatatcattactgctttgttcagaacgaatgatatgtcccttgacaggaattgtgacctcaatcttctgacgttctttttctacacttagtgttacgataatttctgtttcaggagtaaaatatctttctagtttccctaacttttgttcaatgcaactctttaaacctagtgttacatcgatgttttttccgctaatgataaagttcatgctgtcaaccccttttcggtatattctacaaataatagaaataaaaatgagttatttgtagtatgtttgtattatacatcaaaattccgcgaagagcaataaaatatttgataaaaatataaaaaattaataaaagactgacaaaagaaaggctttatagacagtgttcgcagaaaagaaagcaggtgtccatttggacacctgaagtaaattagttttgagtggaagatgatcgatgaaatttttttagaatccatggatagaggaagattacccatagaactaaaagaaagtaagcaaacatatctgccggaagggaatcgccgaacagaaattctatcccgattttgcaggaaacggcgacgagaaggccgataatgagttttccaatctgaaacgggatcgatcctttgacggaaaaattcacatagcgattttcaaaataccagccgacaccgaatccaatccctgcagcagatgctttgcaacagtcagatgcgtagtgaagtgagatatccccacgggaaagtaggaataaggcatagatactgacagcagaagaaaggaacaggagtaacagaagaatcagccttctgtatcgcgtggaatccagaaggaaatcgcttgctttatacacggcaaaggaaatacaaagtgaaactgccatagatacaactacatctttcggcgtgtgtaccccgagatacatgcgggaaaatccaatcagtaaaagcataaaggcaaacaggagcttagaaagccagcgtttgcttttgaacatgaatggagcgaacaggcaagtaccaccctgggtatgtccgcttggaaaggagtatccggtcgcagcaggtacggcgctttccactggagaaaagcttggatctaatatccagggccgtgggatccggaatgtgatctttaatgtctgtacacacagaccggcaagaaagtaagtaaatcccagctgataagcaaagcgcttatccacacaccagtagagtgtgcagataaccgctatgatgatgacttcctgcccaaaataagtgacaaactgaaaaaaatgttccccgaaaggagtacgcagttctgtcagaacgtgtaagaagtccattatttatttcctcgttttctcatctttgaatctaatatttttttgcggatgcgcaatgtctctggagttacttccaaaagttcgtctgtgtcgatgaagtccagtgcctcctcgagactcagtgttctaggagttgtcagtttcaaagcatcgtctgctcctgaagagcgagtattggtaagatgctttgtcttgcaaacattcagctcgatgtcctctgcctttccattctgtccgatgaccattccggcgtagactttctctccggcgccgatgaataacgttccgcgttcttgtgcgctatacaatccgtaagtgacagattcaccagtttcaaaggcaatgagagaaccttgcttacggtactgaatatctcctttgtatggtgcatagccgtcaaaggcagtatttaagattccgtttccttttgtatctgtcataaactctccgcggtagccgatcagtcctcttgcagggatcgaaaattcgagccgagtatagccaccgttagacacacccatattctgaagttctccttttcgttggcttaatttgtcgatgacagttccggtaaattcatctgggacatcgatgtaggccgtttcaatcggctctaacagcttaccgttttcatcttctttgtaaaggacttctgccttgctgactgcaaattcatatccttcccggcgcatattttcaatcagaacggaaaggtggagttcaccgcggccagatactttgaagctgtctgtattttctgattcctctacgcgcagactgacatcggtattcagctcacggaacagacggtctcgcaaatgtcgggaggtaacatattttccctcctgtcctgcaaacgggctgtcatttacaataaactgcatagcgattgtcggttcggaaattttctggaaaggaattgcaaccggattttccggggaacataaagtgtctccgatatggatgtctgcgattccggaaattgccacgatagaaccaatcgttgcttcttttacttctactttatttagtccgtcaaattcatataatttactgatctttacacgtttctgtttgtccggctcatgggcattgacaagcatgacttcctgattgacggcaatcgtaccattgtcgacttttccgacaccgattcgtccaacatattcattgtagtcgatcgtgctgatcagtacctgtgtatctgcatccgggtcgccttccggtgcaggaatgtaatcgatgatcgtctcaaagagcgggatcatgttttccggattgtctgtcagatcaaggattgcatgaccagccttggcagatgcatagacaaatggacagtccagctgctcgtcagatgcgtcaagatccatgaaaagttctaagatttcatcgattacttcgtctgggcgtgcttccgggcggtcgatcttattgatgcagacaatgaccggaaggtcaagctcgagcgcttttttcagaacgaattttgtctgtggcattgcaccttcgaaagcatctacaacaagaacaaccccatttaccattttcaatacacgttctacttcaccgccgaaatcagcgtgtcctggggtgtcgataatgttgatctttgtatccttatagtatacggcagtattttttgagagaatcgtgattccacgttctctttcaatgtcgttagaatccatgacgcgttctgccacttcctggttggcacgaaatacaccactttgttttaaaagctggtcgaccagtgttgtttttccgtggtcaacatgggcgatgattgcgatgtttcggatatcttctctttttgttttcataaataaccttctttctattataaatccatgaataagcactaataactcatacagtttaccacattggcaatagattacaagtcctttttaaaaaaacacataatatggaaagaacacagaaaaaatgagggaagcatatcttgcggtcgatttctgtcgatgaaaagtccggggaatgtccaatcggatggttataaatccgttatcatagaataaaataataaagacaaaaaaatacagcaaagaggagagagataaattatgtccgataagattattgaaaacaaccaggtaacaattatgggagaggtggcatccagattcacatttagtcatgaagtatttggagaaggattctatatggtagatgtcctcgttaagagacttagcaattctgaagatcggattccacttatgatttccgagcgtctgatagatgtgaccaaagattatacaggggaatttatcatggcaagtggacagtttcggtcgtataacagacacgaggaacataagaatcatcttgtactttccgtgtttgttcgggaggtagcatttgtggatgaggaacttgatggggcgaagacaaataatattcttttagatggatacatctgtaaagcacctgtttaccgcaaaacccctcttgggagagaaattgcagatcttctgcttgcagtgaacagaccatatgggaaatctgactacataccatgtatctgttggggaagaaatgcaagatatgcttccggatttgcagtgggagaacatgtgcagattttaggaaggatccaaagcagagaatatgtgaaaaaattgtctgagacagagacagaaaaacgtgtggcatacgaagtgtcagtcagcaagctggaatgtatcggtgctgaaataagtgaagaagagtagtaggaatagctgtggctccattgacattagaaaaaaatgatgataaaatttcagacaagaaatcgctgatgaaatgaaaaaaatcaaagtaaaactgatgtttaggaggataaatatggcaatttttacaggagcaggagtagcgatcataacgccgtttcatgaagatggaagtattaattatgatcagttaaagaagctggtggattatcattgtgagaatggaacagacagtatcgtaatctgcggaacaacaggggaatctgcgacaatgacggaggaagaacatctggagtgtattaaacgcacgattgattttactgcaggaaggattccggtgattgcagggacgggatcaaactgtactgcaacagcggtagagctgtccagagaggctgcaaaagcaggagcagacggactccttgttgtaactccgtattacaataaagcgacgcagaaagggttgatcgaacattataaggcaatcgcaagagaagcagatgcgccgatcatcatgtacagtgtggcaagccgtaccgggtgtaatattgaaccggcgacagttgcggcgttggtaaaagaagtcgataacattgtgggcgtgaaagaagcctccggtaatatttcacaggtggcaaagatcatgcagctgacacagggagatatcgatctgtattctggaaatgatgatcagatcgttccgattttggctctgggaggaaagggggttatctctgtattatccaatgtggctccaagagagacgcatgagatctgtgcaaaattctttgcaggagatattgcaggaagcagagaacttcaattaaaagcgattccgctgatcaatgcactgttcagtgaagttaacccgatccctgttaagaaggcagtttctttgatgggaatggaagccggtggactgcggatgccgctgacagagatggaagaagcaaatgtacagaaattggcacaggcaatgagagcgtttggaattcagctcgcatagagaaagcatagaggagctgccataggatggaagctgtcggaagaatgtagtattgtaggaagaaaagaactgcattctgtccggacagtcattctgtggcagccccttttgtcaattgtatcgcaaaacctcgcacattcgctgtgagggctgtaaaacataagaaaatggaggagaagatgatggtaaaagcaattatgcacggatgtaatgggaaaatggggcaggtaatttccaatcttgtaaaggaagatgatgggattgagattgttgcaggaattgataaatatataggtgtgaaaaatgaatatccggtttttacggatattgcggactgtgatgtggaggcagatgtcgtgattgatttctccaatgcacttgcagtggacggactgctttcttactgtggagagaaaaagcttccggtggtactttgtactactggattgtctgaagagcagcttgcacaggtacagtgtgtttctgaaaagacagcagtgctgaaatcggcaaatatgtcgctgggaatcaatatgctgttaaagcttcttcaggatgctgccaaaattcttgctccggcaggatttgatattgaactggtggaaaagcaccataatctgaaagtagatgccccaagcgggacagcgcttgcactggcggacagcgtaaatgaagcgcttggaaatgcgtatgaatacgtttacgacagaagcaaagaacgcaaaaaaagagaaaagaaagaaatcggaatctcggcagtgcgcggcggaacgattgtaggagaacacgaagtgattttcgccggagcagatgaagtgattgaatttaagcatacggcatactcgaaagcagtctttggaaaaggtgctgtggaagcggcaaaataccttgcagggaaacaagccggactttatgacatgagtgatgtgattgaattttcttctgaaaatcaatagaaaaaattaccattactttccgaatgtatagaatggcagggaatgcagacaatattggcgagaagcaattcttactacatttcaggaaaggaagatagccagatgaagagagcaaagaaaatgatactcagtattttgtgtgtgagtgttcttttgtgcatgacagcgtgtgcaaggggaaacaaagataatgtggcagatgataatactgcaacgggaacaaatgaagagaagaaaaatgacagtgaaagaaagcgggaagaaacaaatacagatggagagacaccgcgtgacggagtgcttgaagatgtaggggatgccgtggaagatggagcaagagacgtcaaagacggagtagaagatgtccttgacggaacagaccagaatgacggacgtacggaaaaacgtatagacgataacaaggatggcggaaatgcggatacaatgaacggtgcgacggacaataccggacaaacgaacacggcaagatagcagaaactgtatatttttttgattttggacgccctgcggctgtatgccgtggggcattcttgcagagatggcagaaaaatgatgaaaactcaaaaaagaatggggatattttgcgggagaacagaatgctttgtggaaaaaatttaacaaaggtgtaaagaagatgggaagagtttatgaacagttgataaacttgttgaagaagcgaaaggatagtgttaaaataagaaacagagtaaatttggataaattaaggagtaggtcatgggtttattagagaagatatttgggacgcacagtgagaatgaattgaagcgtatttatccgatcgttgacagaattgaggcgatggatgaagaaatgcagcaattatccgatacagaactgaaagggaaaacagcggagtttaagaaacgtctggaagagggcgagacattagatgatattttaccggaagcatttgcagtcgtaagagaagcagcttcccgtaccttacatattaagcattacagagtacagctgattggtggaatcattcttcaccagggaagaatcgcagagatgcgtaccggagaaggtaaaacattggtttctacacttcctgcatatttgaatgctttgactggaaagggagttcatattgtaacagtcaatgactatctggcaaagcgtgatgcagagtggatggggcaggtgcatgaatttttaggactgaaagtcggggttgtacttaactcgatggataatgatgagcgaagagaggcatataactgtgacattacttatgtgaccaacaatgaattgggatttgattatctgagagataacatggtcatctataaagagcagcttgtgcagagaggactgcattttgcggttatcgatgaggttgactcggtattgattgatgaggcgagaacaccgttgatcatttccggacagagcggaaagtctacaaagctttatgatgcctgtgacattcttgcaagacagcttgtaaaaggagaggcaagcggtgaattttccaagatcaacgcgatcatgggagaggaaatcgaggagacaggtgatttcatcgtcaatgagaaagaaaagaatgtcaacctgacagaagaaggtgtgaagaaggtagagaagttcttcaacattgagaaccttgcagatgcggagaatctagagattcagcataacattattcttgctttgcgtgcgcacaacttaatgtttaaagatcaggattatgttgtgacttctgacggagaggtaatgatcgttgatgagttcaccggacgtattatgccgggaagacgttattccgatggactccatcaggccattgaggcaaaagaacatgtaaaagtaagacgggaaagtaagacgctggcaacaatcaccttccagaacttgtttaataagtttgagaaaaagagcggtatgacaggtactgcgttgacagaagagaaagaattccgcgatatttacggtatggatgttgttgagattccgacgaacagaccggtgcagagagttgatttaaacgatgcggtatataagacaaagaaagaaaaatttgaagcggtgatcgaggagatcatcgaggcacatgccaaaggtcagccagttcttgtcggtacgatcacgattgagacatcagaacttctcagtaagatgctgaagaagagaggaatccaacataaggtgttaaatgccaaattccacgagaaagaggcggaaatcgtagcagatgcaggtgtgcatggcgctgtaactatcgctacgaatatggccggtcgtggtactgatattaagctggacgatgcggcgagagaagcaggaggactgaagatcatcggtacagagcggcatgaatcaagacgtatcgataatcagctgcgtggacgttctggacgacagggagatccgggagaatccagattctacatttcgctggaagatgatctgatgagactctttggttcggaacgactgatgaatgtctttaacacactcggtgtggaggatggagagcagattgaacataagatgttgtccagtgcgattgagaaggctcagaagaagattgagaataataactttggaatccgtaagaacttacttgagtacgatcaagttatgaatgaacaaagagagatcatttacgaagagcgaagaagagtacttgacggagaaagtatgagagattctatttatcatatgatcacggaatacgtggaaaatgttgtggattcctgcatttctccggatgtagattacgaagaatgggatctgaccgagctggatgtcaacctgcatgcaacactcccaatcaagattccgacaatcgaagatgtcaaaggtatgaaccagaaagaattaaagcatcttttgaaagagcgtgccgtaaaagcttatgaggagaaggaagcagaatttccggagccggagcatttaagagagattgaacgtgtgattcttctgaaggttatcgacgcaaaatggatggatcacattgacgatatggatcagctgcgacagggaatcgggcttcaggcgtatggacagagagatccacttgtagagtataagatgatgggttacgatatgtttggagagatgacagcggcaattgcaaaagatacagtacgtctcctctttaacgtaagaattgaacagaaagtagaacgtgaacaggttgcaaaagtgactggaacaaataaagatgaaagtgcagcacatacgccgatgaagcgggaggagaagaaagtatatccgaatgatccttgtccgtgtggaagcggcaaaaagtataaacagtgctgtggtcgtaaagcataaaagaaaggaaatttctctgcgggcagatatctgccttcgcgggagaaatttctttttacagatttttagataaaaattttgaaaattggaaagaggtgatcaaggtggtagcattggatgagattaagagtattttaaatacatatgaggcaccgctgaaagaactgagggattcactttgacccggaagggaagaagcagagaatcgaggaattagaaagaaaaatcggagaggcagacttttgggatgacgcagaacattctcaaaaagtgatgaaagaactgaaaagcctgcaagattcggtgaaaagaactgaggaactgtaccggcagtatgaggatattcagattttgatcgatatggcatacgaggaaaacgatgagagtatgatcaaagagatcgagacagagttaaaacagatcgagagcacatatgaagaactgcggatcgagacgcttctgtcagaagagtatgataaggataatgcaattgttaccttacatgcgggagcgggcggtacagaggcttgtgactgggtgaatatgctgtaccgaatgtacaatcgctggattgagagcaaaggatttacaacagaagtgctcgattatcttgacggggatattacagggatcaagacagtaacctttgaggtcaatggagagaatgcatatggatatttgcagtcagaaaaaggagtgcacaggctggtgcggatttctccgtttaattcagcaaataaaagacagacttcgtttgcctcatgtgatgtggtgccggatctcgaagatgacattgatattgagattaatgaagatgaattgaaaattgatacttaccgggcgagcggcgccggcggacagcatgtcaataaaacatcatccgcgatccgcctgacacacctgccaaccgggatcgtggtacaatgccagaatgagcgttcccagcacagcaataaggaaaaggcaatgcagatgttaaaggcgaagctttatctgctgaaggaacaagaacaggcagaaaaagtatcgggaatccggggtgaagtaaaggaaatcgggtttggaaaccagatccgttcctatgtgatgcagccttatacgcttgtgaaggatcacagaacgaatgaggaaagcggaaacgttacaagtgtgctggatgggaatctggatccgtttatcaatgcctatctaaagatgcgaaatgcaaaaaaggaagaaaaataaaagtctggtgatccagacaaggagagtggaacgttatggataagacaaagtattatgtattaaagaaaaaggctgttccggaagtacttttaaaagtcgtagaagtaaaaaggcttcttgctgctgagcgggggctgaccattcaggaagcgacagagcgaatcggaatcagcagaagctctttctacaaatacaaagacgatatatttccgtttcatgaaaatgaaaaagggcagacagtgacgatggtcattcagatggatgatacaccgggacttttagcagaacttctcagagaggcggcaaagtatcgtgcgaatatcctgactattcatcagagtattccgatcaacggaattgcaacattgacacttagtatagaaattttatcgacaacaggaaatatatcggagatggtggacgagatggaagaaaatgaaggcgtccattatctgaaaattgtaggcagggagtagactatgataaatattgcagtattaggatatggaacagtaggctccggggtagtagaggtgctcgacacaaacagagagtgtatcagccagagagtcggagaagaaatccgggtaaaatatgtgctggatctcagagactttccgggagatccggtacagaacatactggtccataattttgaggaaatcatcagggatgaggatgttaaaatcgttgtagaagttatgggagggattgagcctgcatatacttttgtgaagcgctcacttctcgctggaaagagtgtggcgacatcgaacaaggcgcttgtagcaaagcacggagcagaacttttatcaatcgcaaaagaaaagcagatcaattttttatttgaggcaagtgtgggaggaggaatcccgattatccgcccgctcaattcttctatgaccgcagatgagattgaagagattacagggatcttaaatggaacaacaaactatatgctgacgaagatgttctatgaaggagcagggtacgaagaagtgctccggcaggcgcaggaaaacggatatgcagagaagaatccggaagcagatgtagaaggttatgatgcatgtcgtaagattgcaatcctatcctctctgatctcgggacatcaagttgattttgaggatatttacacagaagggatcacagaaatcacagagagggatatggagtacgcaaagcagatgcagatgacgattaagctgcttgcgagcagtagaagaagcggcgaatgcttaagcgcgatcgtggcaccatgtcttcttgagaatacccatcctctttttggagtcaatggagtatttaatgcgatttttgtacatggaaatgtacttggggatgcgatgttttatggaagtggcgcgggaaaacttccgaccgcgagtgcagttgtggcagatgttgtggaggaagcaaaaaatctgaaccgcaatgttatgaccatgtggaagagtgataagctaaaacttcaggataaaggcgatacaatccgaagattttttgtgcggatcacaggaaatgcggaggcgatgaagacttatatcgagagtattttcggaccggttcagattgtgatgcttccggatgtggaggaagagtttggatttctcacagggcgcatgacggagcgggcatatgaggagtgtgcggcaaaatttccgaatattatccgtatgatccgcatgcaggaacagagcggggccaaagagtaaaagattcttcggaatgtctggtacgagaacaaggagaaaggagagtctgttcgtgtaaaatagaaagcggacagaaaagtgatatgctgatagtgaaaaaatttggcggcagttccgttgcgaacaaggagcggatctttcgggtcgcagagcgatgtatagaagaatataagaagggaaatgatgttgtagttgtactgtccgcaatgggagatacgactgatgaactgcttgcaaaagctgctgacatcaatccgaatgcaccaaagagagagctggatatgcttctgacgacaggagaacaggtttctgtatcattgatggcgatggcaatgcacgcactcggagtgccggcagtttctctgaatgcgtatcaggttatgatgcattccacctctagatatggaaatgcaagatttaagcgaattgattcagaacggatcagacacgaattggattctcggaagattgtcattgtcaccggctttcagggagtcaataaatatgatgattatacaacacttggaagaggtggttcggatacgactgcagtggcgcttgcagcggcattgcgcgcagatgcgtgtgagatttatacagatgtagatggagtatacacagcggatccgcgtgttgtaaaaaatgcgagaaaattaaaagagattacctacgatgaaatgctggaattagcaacttcgggggcgaaagtgcttcataatcgctctgtggagatggcaaaaaaatatggcgtacagctggtagtcagatctagcttgaatttagaagaaggaacgactgtgaaggaggtagcgaagatggagaaaatgttgatcagtggggtagcaggggataagaatacagcacgaatttcagtacttggagtcagtgaccaaccgggagtggcatttaagatcttccacacgttggcaaaaaataatatcaatgtggacatcatccttcagtctgtcggacgggaagggacaaaggacatttcttttactgtttctcaggaagatctaaagccggcactggcaatcctggaggaatatcaggagccaatgacaatccgggagatcaagtgggaggatactgttgcaaaaatatcaatcgtgggagcaggtatgatgagcaatccgggggttgcggcaaagttatttgaatcgctctacaacaatggaatcaatatcaacatgatctctacttcagaaatacgtattacggttctgatcgatgagaaggaaattgacaaggcaatgcaggcagtccatgatgggtttggacttggagatgtgtaagaacgagagggaaaacaaaaaagggagggtgaagtaggaccctctcttgtgtatttgcaaaaagattttgctaagatcagagcagtttcatctgactcagagcgctgttgtgatattgtggacagaacgttacatcttcgccaaaccagtcaggcggagtgaaatgttcagcggacattgcatctgcaaattcaacttctgcaatttggagtccggagagcttgccggaaaaaatatccagttcgatggtaagcgagtcggagagcggaatcatatagcgagttttttcgatgcagattccgtcaatctttgtcttaagatgttcgtagccttcagcggtcagaggaagattgtgttcttctcggatcatcatgccgcgggatttgtaggtgagttcatagcggtcgttatcctttcggatacgcacgacggggtttgtgcagagatagccctgttcaatcgtgcgaaagggaaaggaagacagatcaaaagggattgtgtggatcagatatttacgttcgatttccataaaaaatacctccagtgatttttacatacagcgacaaatttgtgtcggttatttaaaataacagttcaaaatactcttcggtatcatagtacagataaatgaaaatgtaaagcagtcatggaaaaaatacgtagggaaaggaaaggttgatatgaaaaaagaagctgtgatctttcttgcagaaggatttgaagaagtggaagcactggcagttgtggatgtactgcgcagggcgggagccgttgttcgtatggtatcagtcagcggcaagaagtatgtggcaggttctcatcaaatttgcgtgcaggcagatgaagtgtttggagaaaagacttatgaggaggcagaggtggtgattcttccgggaggcatgccgggaacactccatttgaaagcacatgaaggagtaagaagtgttgtaaaaagggcagccaaagaaaaggttgtggctgcaatctgtgcggctcctaccgtgcttgcggatatggggctgttggaaggaaaagaggcaacctgctatccggggatggaaaaagacatgtgcaaggctgtctgccgggaggagaaggtagtacagtcgggaaacatcattaccggaagagggctgggcactgcaattgattttgcgttgaggttgacagaagtattgtttggcagagaacaggaagagaaagtcagagagactatcgtatattctgcgcaggaataaaacaaaatggaaatgaggtatctatgcggaaacagaaaaggatcatgatatgtttttgtctgctgctcggcatgagtttggtcggctgtggagtattgaaaggatttgatgcagaagcctatacggaggcagttttaaagcagcggctttcgggggatacaaaagcaattgccagacttaccgaggagatgtcagaagaagaattgaccgcacagtacgagaaagaagtgcagacgtttgttgcgggatatatcacaaaggatgtgtcgatgggagaagaattgacagaaaaatatacggcattgtgttccgaaatttttaaaagtctgaagtatgaaacggcgaaagccgaaaagaaggataagaatacttatgatgtgaatgtggatatttatccgacggatatatttgtgactttttcagaaaaattaaaacatcctgcagatgaaatgatccagaaggcagaaaatggtgagtataaaggtactgaggaagaaatcaagacccaaatgcaaagcgagtttttagaatattcctatacgctcttagaagagagtttcgagggagcgcaaaatggcaaaaaagaaacggtagtgttgacgatcagcaataaggagaaaaagggatttgcagttgaagaagaaagcttttcaaactttcttacagcaatactcagacttgatgaagtgaaatgacctggcagggaaatgcaaaataatttgaaatacacactagtaatttcagatactttatgctataattttttagtgactctgagtaggagtaattatacgaagtgaaaaacaaaagttaccatatataaggaggaaactgtaaatgagtttacaagtagaaaatttagaaaagaacatggcgaagcttacaatcgaagtgtccgctgaagaattagaaaaagcaatccagggtgcatacttaaaacagaaaaataaaatcagcgtaccaggattccgtaaaggaaaagttccgcgtcagatgatcgagaaaatgtatggagcagagattttctatgatgatgctgcaaacgcactcattccggaagcatattccaatgcttatgatgaaagtggattagagattgtttctcagccaaaagtagaagtagttcagttagaaaaaggaaaaccatttattttcacagcagaagttgcagtaaaaccggaagtaactctcggtgagtacaaaggtcttgaagtagacaaagtttctaacagagtaactgcaaaagaagttgaagaagagatcaaaaaagaacaggaaaagaatgcaagaacaattgaagtagaagaccgtgcagtacaggacggagatgaagttgtattagacttcgaaggatttgttgatggtgttgcatttgaaggtggaaaaggagaaaactatccgttaacaatcggatcaggatctttcatcccaggatttgaagagcagttagtaggtgctgaaaaagaaaaagaagtagaagtaaatgtgacattcccagaagaatatcatgcagaagaattagcaggaaaaccggcagtgttcaagtgtacagtacacgagatcaaagcaaaagaacttccggaattagatgatgaattcgcagcagaggtttctgaatttgatacattagacgcttacaaagcagatgtgaaagcaaagatcaaagagagaaagaacacagaaggaagaagaaagaaagaagatcaggcagtagaaaaagcagttgcaaacgctacaatggagattccggatgcgatgatcgacactgaggtaagacagatggcaaatgatttctcacagagaatcatgcagcaaggacttactatggaacagtacttccagttcacaggaatgacagcagagaagatgctcgaagaacttcgtccacaggctgtaaaacgtattgagacaagattagttctggaagcaatcgcaaaagctgagaacattgagatcagcgatgaaaaattagatgaagaattagctaaaatggcagaagcttacaagatggaagtagaaaaactgaaagaattcatgggagaagctgagaagaaacagatgaaagctgatatggcagttcaggaagctgttacattcttagtagaatcggcagtagaagcttaattcattttggcattgcaaaaaaaataggagggatatacatgagcttagtaccttatgtcattgaacaaacaagccgtggagaacgctcttacgacatttattcaagactattaaaagacagaattatttttctcggagaagaagtaaacgatgtgtctgcaagtgtgatcgttgcccagttattatttttagaggcagaggatccagagaaagacatccatctttacatcaacagtccgggtggctcggtaacggcaggaatggcaatctatgatacaatgcagtttatcaaatgtgacgtatcgacaacatgtattggtatggcggcaagtatgggagccttcttattagccggaggagcaaaaggaaaaagatacgctcttccgaatgcggagatcatgatccaccagccgtcaggcggtgcacagggacaggcaacagatattaagatcgtagctgaccatatcttaaagacccgcacaaaattaaataaaattttagcagaaaatactggtcaggatttatctgtgatcgaagtagacacagagagagataactatatgtctgctgaggaagcaaaggcatatgggctgattgacgaagtaattattaagcattagactaaggaggggttgttccgggtgggcatcccctttccgtgtaaaaatgaggtgagcatatggcaggaaaaatgagcgatgatctgataagatgttcgttctgcaacaagacacaggcgcaggtgcgcaagctgattgcaggcccgaatggggcatatatctgtgacgagtgtattgatgtatgtgcagaaattatagaagaagaatttgcttacgaggacgagagtaaatttagcggaatcaatctgttaaagccggaagagatcaaagcatttttagatgattatgtaatcggacaggacgaagcaaaaaaagtgttagcagtttccgtgtacaatcattacaaaagaattatggcagagaaagacctgggagtggagctgcagaagagtaatattctgatgttaggaccaaccgggtgtggaaagacatttctcgcacagacgcttgcaaagattctgaatgtaccgtttgcgatcgcagatgcgactgcgttgacagaagcaggatatgtaggagaagatgtggaaaacattcttctgaagatcattcaggcggcagatggagatattgagcgcgcagagtatggaattatctatatcgatgagattgataagatcacgagaaaatcagaaaatccatcgattacaagagacgtatcaggtgagggagtgcagcaggcgctcttaaaaatccttgagggaacggttgcctctgttccgccacaaggaggaagaaaacatcctcaccaagaactgatcccaatcgatacgacaaatattctgtttatttgcggaggagcttttgagggcattgagaagatcatagagtctcgtgtggataagaaatcaatcgggttcaattctaagatgacaggtgccaatgagcatgataaagacaagctgttaagtcaggtgcttccgcaggatcttgtgaaatttggattgattccagaacttgtagggcgagttccggtgacggtaactttagaacagcttgacgaagatgcgctgatccgcattttgacggagccaaagagtgcgatcgtcaaacagtatcagaagttgctagaacttgatggtgtagatcttcaatttgatgaagatgcactgaaagagattgcgaagatttctctttctagaaagactggtgcgagaggccttcgtgcgattctggaaaatgtcatgatggacacaatgtttaaagtgccatcagatgataagatcaagacatgcagaattacagaaaatgtagtaaaaggactggaagatccagaatatggatatgagcgtgtacttcttccaaagagggagaaagtggcatcagaaagtgcatagaaaagagaaagggacgggggaagcggattctcctgtcctgttttataatagataacatttggaggaaatatggagaaaatactggaaagcctgccgatgattccgcttcgcggcatgacgatccttccagagatggtcgtacattttgatatcagcaggaaaaaatcgatcgaagccgtgcaggaagcgatggtgggagatcagagaatatttttagtgacacagcgggaagtggagaccgaagagccacagcaaaaagaattgtttgaaatcgggacgattggtacaatcaagcaagtgatcaagcttccgaaaaagattttgaggattcttgtagtaggagaagagcgggcaatgcttcgcaatattgagtgcggggagccatacatgagggcgcttgtggaagtagagcgtgaagaaaaaaaagagttgccagaggaggaaggaatccaggaacaggatccgcagaccgaagcacttgtgagaaatctgaaagaaatgtttgcagaattaggggtgaaaagtccgaaagttagcaaagagaccgttgcacagattcttgatattgacgatcccaaaaagctggtcagacagatttgtgcaaatattccgcttccttatcgggaacttcaggaactattgaatgaaggagatccatggaaactttacgagctgcttagttttaagttggtcaatgaacttcagattatgaatattaaggaagaacttcaggtcaaagtcaaagagcgtgtcgataagcaccagagagagtatattttaagagaacagttaaagctgatccgggaagaactcggtgatgatacgacaatgagtgatgctgaagaattcgaggctgcgacaaagaaactggaagcatccaaagaagtcaaagagaagctgatgaaagaaatcaagcgttttaaaaattctatgggaagtgcggcagagacctcggtcatccgaacttatattgagactatgctggagatgccgtgggataaaaagaaagaagaaagttatgacttaagctacgcaaaagaggttctggaaaaagaacattatggattggaggaagtcaaagagcgtgtgttggaatatcttgcagtccgtacactcacacagaaagggaacacaccgattctgtgtctgataggacctccgggaactggaaaaacttccattgcacggtcgcttgcaaaagctctccacaaaccatatgtgagaatttcgctcggcggcgtcaaagatgaggcggaaatccggggacataggaagacgtatgtcggtgcaatgccaggaagaattgcaaatgggttgaagacagcaggagtcaaaaatccgttgatgctgttagatgagatagacaaagcaagttccgactataagggggatactttctcagcacttttggaagtgcttgacagtgagcagaattataagttccgggatcattatcttgaagttccagtggatctttcggaagtattgtttgtcacaactgcaaattcactccaaactattccgagaccgctgttagaccgtatggagatcattgagatcagcagttacacagaaaatgaaaaagagcatattgcagacagacacttgattccgaaacaattggaacgtcatggattatccgaggaacaacttcagatcagtaagaatgccgtaggaaagatgatccgttcttacacgaaagaagcaggggtgcgccaattggagcgaaagattggggctatttgcaggaaatctgcaaaagagattcttgagaaggacagaaagaaaatccgggtgacggagaagaatattgaaaagtatcttggaaaagaaatcttcacgtatgagatggcaaatgaaacagacgaagtcggaattgtgcgcgggctggcatggacaagtgtcggaggggatacacttcagattgaagtgaatctgatgccgggaaaaggggaattacttttaaccggacagcttggggatgtcatgaaagagtcggcgatggccgggatcagctatattcgctcgatcagtgaaaaatatggaattgaggcagattattttgaaaaacatgatttccatgtacatattccggagggggctgttccaaaagacggaccatctgccggaatcacgatggcgacggcaatcttttcggcaattctgaatcgaaaagtgcgcgcagatgttgcgatgacaggagagatcacactgcgtggaagagtgcttccgattggaggactgaaagaaaaattgttggcggccaagaatgccgggatcaagaaggtgctgatcccagcaaggaacaaaagagatgtggaagaactttcaacagagattacaaaaggactggaaatcattccggtagaacaaatggaagaagtgttagaacatgcatttgttcgggaataggaaggaaaggaaaaattatgattatcagaaatattaatttagagactgtctgcgggatcacaagtaagctgccggaaaatgataagccggagattgcgtttgcagggaaatcaaatgtggggaaatcttcgttgatcaatgcgctgatgaaccgcaaatcctatgcaagaatttcagccacaccaggaaagacgcagacaattaatttttataatatcaatgaagagatgtaccttgtggatctcccgggatatggatatgcaaaagtgtcggagaaagagaaaatccagtggggaaaattgattgaaaaatatctgcatacatcaaaacagttacgggcagtgtttcttctgatcgacatccggcatgaaccatcggctaatgataagatgatgtatcagtggatcgtggatcaaggatataatccgattattattgcgacaaaattagataaaatcaagcgcagccaggtgcaaaaacatgttaaaatgataaaagaaggtctgcagcttgtgccgggaacgacagttattccattctcttcggagacaaaacagggaagagatgagatttgggacctggtcgagcgagaatttctaaatgacgaagagacattacaggaaactgaaaactaagaagcaaagaaagcttactgattcataaaaaagaggtggagcatatggaagacagaagaccttactggaaagtagcggcaagtcttttggtcagtctgattggaacagtcgtgtttgtggtggtaggatttcaactgatgaggtattttatgccattcgtgattgggtgggtaatcgcaatgattgccaatccggtcgtgcgatggctggaaaagcggttgaagatcgtaagaaagctgggatcagcgatcattattgtaatggtgctcggtctgatcgtgacaggactttactttggattcagcaaggcgtttacggaaatcaaaatttttattgacaattttccggagatgtatcagcagttcgaggaagattttcgacagatcggaagagaattccaggggatttttcatttgttgccagcagaactgcaggtgggctgggatgagatggtcaacaatatggatcagggaatggcagatttgatcacggggatcagcgagccgacagtgactgcagcaggaaactttgcaaagcgtcttccatctattttgattgcagtaatcgtgacggtcatttctgcttacatttttattgcggaacgtgacgagatcattgtgtggagcaagaagatcgctccaagtgcagttcagaaaaaaatgacgatggttgtggacaattttaaatgtgcagtggggggatattttaaagcgcagtttaagattatgatcgttgttgcactgatcttgagtttgggcctggcattcctaaaagtcaagtatgtgttactctgtgcaattttgattgcactgcttgattttcttccattttttggaaccgggacagcaatgataccgtgggctgtattcgagtttctgacaggggactataaacttgcaatcggtctgattattttatatgctaccacacagcttgtaagacagctgattcagcctaagcttgtggcagatagcatgggactgacgccgcttgtgacattggttctgctttatgttggttacaagatgggaagtgtatttggcatgatactggcagttccggcaggaatgatcgttattaatatgtacaaagcaggagcctttgattatattttagatgatgtgaaaatattgctcaaagggattcaaaagctcagagagccttaagggaaaccaatccgaccggacgtgtctgggaaagatgggaattagaaaaggcgatggagatttataaagagaatgacgtctatgtgatttccgatgaaatctggtctgatcttgttctccatggaaatcagcatattccgacacagtctgtatctgaagacgcgaaaaatcgtacagtagctcagtatgctccgtctaagacatttaatcttgcgggaatggtaggaagttaccatattatctataacaaatatatccgcgagcgtgtggaaaaagaatcttccttatgccattacaattcgatcaacctcttatcgatgtatgcgctgatgggagcttattgtgaagagggtgcagagtggacagatgagcttcgcgaggtgcttggtgaaaatgtaacatacgcatgtgattttattgaagcacatttccctggggtaaaagtgtcaagaccgcagggaacgtatatgttgtttttagattgtacggagtggtgcaaggaacatggaactacgatcgatgaagtgcaggccaaaggatatgaagtaggtgttgtctggcaggatgggcgtgcattccacggtccatgtgcaattcgtatgaatttggcacttccatttagtcgagtaaaagaggcatttgacagacttgcagagtatgtattttgttaagatagaagcggtgaaagtttagatttcctgctagtttgcagaagaaaaatgcgaccgtagaggaaattgggatatggatctgtgacagaatattcgatttgaaagaacaggactgcgacctatcagggggaaatgaggaacccagataggtgcggtccttttgttataggagtgtttctaaaataaagagaaaagttaaccgagtgctacatccagaatcatcatgacacagaagccgactgcaaatccgattgtggcaatgttggaatgtgttccttcacttgcctcagggatgatctcttctacgattacataaatcatagctcctgccgcaaaacttagcaggtatggaaggagtggaatcagaaaatcggagagcaggattactgcgattgccccaaacggttccaccagaccggaaagcgtaccgtagagaaatgattttctgcggctgattccttctgatttcagtggcatggagatgattgccccttctgggaaattctgaatcgcaatcccgacagagagagcaaaagcagaggcaagagttacctctgtaccggcatttttcagtccggcaaatacggcaccgactgccatcccttccggcagattgtggattgcgactgcaagaatcatcatagttgttttttgaagactgctctttggtccttccggttgcgtttgattgaggtgtagatgtggaatcaggcggtcaaagagaagcaggagcaagatgccgatcagaagaccggatattgctgggaggaagctgaactttcccatgcctctttcggtagacagatccattgcgggaatcagcagagaccagacggatgcggccatcatcaccccggaagaaaatccgagcaaagccttctgcaaaagaggatggattttgtctttcataaaaaacaccatagctgcgccgagggtagttccgacaaatgggatggaaacccctgcaattgtattaaaatctaacatagaacctccttgtactttttgataaaaatgaaatgtttaatggaaaaattatattgttatcatattgtgaagtgtgaaaaatgtcaatggcaatggaaaaagaaggaacagaacaaacattcgatttcttctgtacttttattttatattctgatataatagcgtaaaagaaagaagataatagtattacgaagaatccggttattcgaaaaatttgaatgacggtgagaacataaaggagaaataatggagcactttgagttagtatcagaatatgccccaaccggtgaccagccacaagccatcgagcagcttgtcaaaggttttcaggaaggaaaccaatgccagacgcttcttggagttaccggttcggggaagacattcacaatggcgaatgtcattcaacaattaaacaaaccaacattaattatcgcccacaataaaactttggctgctcagttatacggcgaatttaaagagttctttcctaataatgcggtagaatattttgtatcctactatgactactaccaaccagaagcctatgtcccatcttcggacacctacattgcaaaggattctgccatcaatgatgagattgataagcttcgacactctgcgacagctgcactgtcggagcgaagagatgtgattattgtggcgagtgtatcttgcatctatggactgggttcaccgattgattatcaggagatggtgatctcgctgaggccaggtatgatcaaggaccgggatgaggtcattgcgaagttgattgagattcaatacgatagaaatgatatggattttaagcgtggaaccttccgtgtaagaggcgatgtactggaaatctttccggcaatctcggaagattatgcaatccgagcagagttttttggagatgagattgaacggatcacggagattgatcttctgacaggagagattaagagcgaactgagccatgttgcaatttttccggcatcacactacgtcgtatcgaaggagagcattgaccgggcaacgaaggcaatcgaggaagaactggaggagcaggttcggtactttaagagtgaggacaagctgctggaggcacagagaatcgcagaacggacgaattttgatatcgagatgatgagagaaactgggttctgttcgggaattgagaattattccagacacctgacgggattaaaaccgggagaagcgccacacacattgattgattattttccggatgatttcatcattatgattgatgagtcacataagacaattccgcagattgggggaatgtatgcgggggaccgctcccgcaagaagactttggtggactatgggtttaggcttccttcggcgttggataaccgaccgctgaattttgaagaatttgaaagtaaggtcaatcaaatgctgtttgtctctgctacgccgggagagtatgaggaacgcaatgaacttctgcgggcagagcaggtaatccgtccgacaggacttcttgatccggaggtggaagtacgtccggtggaagggcagatagacgatcttgttggcgaagtgaataaagagattgcgaagaaaaataaggtgctgatcacaacgctgacgaagcgtatggcagaggatcttacggattatatgcgagaacttggaatccgggtgaaataccttcattcggatatcgacactttggagcggacagagatcattcgcgatatgcgtatggatgtgttcgatgttcttgtgggaatcaaccttttgcgagaagggttggatattccggagatcacacttgttgcgattctcgatgcagacaaggaaggattccttcgttcggagacatcgctgatccagacgatcggtcgagctgcaaggaatgcagagggtcatgtgattatgtacgcggatacgatgacagattctatgaaggctgccattgaagagacaaagcgaagacgtcaggtacagatggaatacaatgagaagcatggaattatgccgaagacaatacacaaatccgtacgggatctgatcagtatttcaaaaaaggtgtcttccgaggagatgaagctggaaaaagatccggaatctatgagtgaaaaggaattacaggctgcaattaaggatattaataagaagatgaaaaaagccgcagcagaactgaattttgaggtggcagcagaactaagagatcagctgatagaatttaagaaaaagctgttggagatagaggaatcataaggacaaagaaaagaagaggtaagaaatggcacgcaaagcagaaaagaagcagtatattaagattagaggtgcaaacgaacacaatctgaaaaatattgatgtggatattccgagaaatgagcttgtagtattgacaggattgagtggttctggaaagtcttctctggcatttgatacgatttatgcagagggacagagaaggtatatggagtcattatcctcctacgcgagacagtttctaggacagatggagaagccggatgtagagagtatcgaaggcctttccccggcgatttcgatcgatcagaaatctacgaatcgaaatccgaggtcgacagttggaacggtgacggagatttatgattattttcgattactgtatgcgaggattggtatcccacattgtccaaagtgtggaaaagagattaaaaagcagacagtggatcagatgacagatcagattatggaactgccggaaggaacgaagattcaactacttgctccggtagtcagagggcgcaagggaactcacgcaaaactgtttgagaaagcgaagaagagtggatatgttcgtgtgcgcgtggatggaagtatgtatgaactgaccgaggagattatactggataagaatatcaagcataatattgaaattgttgtagatcgtctgatcgtacgggaagggattgaaaaaagactgtcagattcgattgagagtgtactgacattggcggaaggattgcttcaggtagatgtgatcggcggagaaacattaaatttcagccagagtttttcctgtccagattgtggaatcagtatcgaagaaattgagccgagaagcttttctttcaataatccttttggagcatgtccggattgttatggtcttggatataagatggaatttgatattgatttgatgatcccggataaaacactcagtatcaatgacggagcgattacggtgatcggatggcagtcttgcacagataaagggagttttacaagagcaatcctggaggcactctgcaaagagtacgggtttgatctggatacgccgtttgaggactatccggaagcggtgcagcatgtgctgattcatggtacagatggaagggaagtgaaagtatactataaaggacagcggggcgaaggtgtttatgatgtcgcgtttgagggactgctaaggaatgtagagcgccgataccgggagactggctctgagacgatgaaagcagaatatgaatcttttatgcggattaccccgtgtcatacttgtgggggacagcgtttgaagaaggatgcgcttgcagtgactgtcggcggaatgaatattgcggaggtaaccgcattatcaatcgaaaaattgcaaaaatttcttgcagaactcgtgttgacagagacacaggagctgatcggcggacagattctaaaggagatcaaagcgaggacaaattttctgatggatgttgggctggattaccttaccctttctcgggcgacaggaacactctccggcggtgaggcacagagaatccgactggcgacccagatcggttccggacttgtaggtgtggcctacatccttgatgagccgagcattggactgcaccagagagacaatgacaagttgttaaagacgttgaagcatttaagagaccttggaaatacattgattgttgtagaacatgatgaagatacgatgaaggaagcggattatattgtcgatatcggtccgggggcaggagagcacggcggagaagttgtagcggcaggtacggcaaaagagattatgaaaaataaaaaatctgtgacgggcgcgtatctgagcggtcggaagaagattccggtgccggaagaaagaagggagccgaaaggatttcttaagattcttggagcaagagaaaacaatttgaaaaatattgatgtggagattccactgggggtcatgacatgtgtgacaggagtctcgggatctggaaagagttctcttgtgaatgagattttatataaagcactggcaaaagaactgaaccgcgcccggacaattcctggaaagcatacgcggatcgaagggctggaacaggtagataaagtaatcaatatagaccaatctccaatcggaaggacgccgagatcgaatccggcaacttatacgggagtctttgatctgatccgtgatctgtttgcggcaacagcagacgcaaaggccagagggtataagaaaggaagattcagttttaatgtcaagggaggacgatgtgaagcgtgcagtggagatgggattctgaaaatcgagatgcactttttaccggatgtctatgtaccatgtgaagtttgtcatggaaaaaggtataaccgtgagacgttggaggtaaaatataaaggaaaaagtatttatgatgtactcaatatgactgtggaagaagcacttcatttctttgaaaatgtgccgagcatccgcaggaaaatggagacgttgtatgatgtaggactgtcttacattcgtcttggacagccatccaccacattgtcgggaggagaagcgcagaggatcaaattggcggcggaattgagtaagcgcagcaccggaaaaacggtgtatatcttggatgaaccgacaactggactgcattttgcggatgtgcataagcttacagaaattttgcagaagctgtctgcagatggaaatacagtggtagtcattgagcataatctggatgtgattaaaacggctgattatctgatcgatatcggtccggaaggaggagacaaaggagggacggtgatcgcaaaaggaacaccggaacaggttgccgcttccgaatgctcttacaccggaaagtatattgcaccgctgttgcggcaaggggaataaacaaaaaatcagacagacgaaaatgaggaaaggggaatcgagatgtcggcagatatcggaattgatctgggaactgcaagcgtactcgtgtttataaaaggcaaaggggttgtactaaaggagccctctgtcgtggcacttgaccgggatacgaaagagataaaagccattggagaagaagctagactgatgcttggaaggacaccggggaatatcatcgcgatcagacctttggaaaaaggtgttgtatcagactatacggtcacagagaagatgattaaatattttgtgcagaagtcgctcggaagaaggatgttaaagaaacctagaatcagcatttgtgttccgtgtcagatcacagaagtggaacagaaggccgtggaggaggctgcttatgcagcaggagcaagagaagtctgtcttgtggaagaaccggtggcggcagcgatcggagctggtttggatattatgaagccatttggcaatatgatcgtagatattggcggcggaacaacggatgtggcggtgatttcgctgggggcagcagtggtccatacttctgtgaagacggcggggaatgattttgatgaggcaattgcacgctatatgagaaaaaagcagaatctgctggttggtgatcgtacggcggaggagattaagatcaaagtgggaacggtttatccgcttgaagaggaactagagatagaaatcagaggacggaatcttgtgacgggattgccgaaaacagttacggtgacttcctcagagacagagtctgtcctgagggaagtggcagaccaaattgtagagtcggtgatacatgtactggagcagacaccaccggaattgtcagcggatattttggagcgtggaattatgctgaccggaggaggtgcacttctgcgggggatggatacactgatggaggagaagacgggaatccggacgatggcagcagaagatccgatgaaagttgttgcagtgggaagtggacaatttgcagaagttactgggatgagaagaaattcttagtcaggtttagattttacaaaaaacattgaaaataatagagcataagctgccgggaagtaaggaattcggaagaacagacagaggaagggaaatcctgtgaaaaagtttggatgaaagctttagttcacggcagttttttttatatattttgtgtgatagaaggagcatatgtattttctgaaaagcaatctacaaaggagttttcatgcttttaagaacatggtacgatagaaacagatttaacagaaaaggaaaagagcaggaacatggagaaaataatcggatatgtggagcacattgtgtttcgcaatgaagacaatggttatacggtgtttcatctgcacaatgaagatggggatctgacttgtgtcgggatgtttcattatattagcgagggagagtttctggaggtatccggagaatatacgaatcatgcggtgtatggatcacagcttcaagtacaggagtatcgggtaaaagagccagaagatcttcattctatagaagtttatcttggttccggagcaatcaagggacttggaagtgcgctggcaggcagaattgtaagaaaattcaaaggggataccttccgcatcatcgaagaagagccggaacgtctcgcagagatcaaagggatcagcgagagaatggcaagagagattgcagtgcaggtagaagagaagaaggaaatgcgacaggcaatgttgtatttgcagaaatatggtatttcaacaacacttgcggcaaagatttatcagcattatggacagagcatttatcgcgtggtcgaacagaatccgtatcagctggcagatcatgtagagggggttggatttaagactgccgatgagatcgcagcaaaggtagggatccatacagactctgatttccgaatccggagtggtatcttttatacgttgcttcaggcagttggggaaggacacgtgtaccttccggaacagacactgcttgcgcgaacaagccaacttttgcaggtgaaaattgaagatatggagcggcatctgatggatctgtgtatggaaaagaagatcgtcgtcaaggagaagccagagggaaagagagtgtatgcttctcatttctattatctggaattaaatactgcaaaaatgttgtacgatctagatatcaaaaatgaagtgggagaagattatctggaaaagcgcctgagcaagattgaggcgtatgcagagctatctttggatgaattgcagcggacagcagtaaaagaagcagtaaaaaatggtctgcttgtgctgactggagggccaggaactggaaagacaacgacgatcaatgcgatgattcatttttttgagagcgaagggctgaatatttatctggcggcaccgaccggacgtgcggcaaagagaatgacggaggcgactggttgcgaggcgcagacattacacagactgctggaggtcaatggcaatccagagggggaacagacaggaggatttggaagaaatgaagagaatccgctggaggcagatgtgatcatcatagatgaaatgtcaatggtggatctatctttgtttcatgcgcttttaaaggcagtgatggttgggactcatctgatccttgtgggggacgtcaatcagcttccatcagtgggaccgggaagtgtgttgaaggatatgatcaaatcagaatgttttccggttgtgcggctcaataagattttccgccaggcgggggaaagtgatattgtagtcaatgcgcataagattaacaatggagagccggttgagctgaaaaacaaaggaagagatttctttttcttaaaacggcaggatgcaaacgtgatcatcagcatcgtcatccagcttgtaaaggaaaaaatgccgaagtatgtggatgctccgatgcatgagatccaggtgcttacaccaatgaaaaaaggattgatcggggtagagcggcttaatgtgatcttacaggaatatctgaatccgccggatcgaaagaaagaagaaaaagaatatggaaataagaaattccgggttggcgacaaggtcatgcagattaagaataattaccagctggagtgggaagtcaaaacgaaatatgggctgactgtggacaaaggagttggcatttttaacggagatatgggaatcgtcaagaaaatcgatcattaccaggaactcatgacggtggagtatgaagaaggaaagcaggtagaatattcctttaaaatgctggaggagttggagttggcgtatgcgatcacgatacataaatcccaggggagcgagtatccggcggttgtgattccgcttctgccgggcccaagactgctatatcacagaaatttattatatacagcgattacaagggcaaaaaagtgtgttacactggtaggagatgagcatactttttatgagatgattgaaaatcaaagtgagcaaaaacggtatacgagtctggcggaagcgattcgtgagcggtatgaaagtatcttgtgatacaaagaatgaaaaaaacagagaaacagaagaacagagaaagaaaaacagcagaaaaatggagagcaaaacttatagggcacaggattttagaattactttatccgaccacttgtgtgttttgtggaacagtagcttctgaggggatttgtgaaagctgccggaaggaagtaaagatactgcaggagcctctctgtaaaaaatgtggaaaaccagtgcgctatgaggagcaggaatactgctatgactgtcagaaaatcatacatttctatgagcagggaaggggtctgtggctccataaaatgccggtttcgcaatcgatttatcagtttaagtatagaaatcgccgcgtatttgcacagtactatgcggaacaaatggcaggacagtttgcagatctgttaagaaaatggcagatcgaggtgatcattcctgtaccaattcataaaagtaagcggagaaaacgaggatacaatcaggcagaagttttggcaaaagagctttccggacggttggaggtccctatggaggcatttgcagtccgaagagttcaaaaaacaaatgcattgaaagagatgaatccaaatgagagaaggagggcactttccggagcctttgccgtggaggatgactggaagccaaagaaaaaagtacttctggtcgatgatatctatacaacgggaagtactgtggatgagcttgcccgcatattgaaagaaaatggggtacaaaaagtatattttctgactataagtgttggacaaggtttctgattatatgctatactaaaaatagtgtttggctgaggggaaaaacagagacagaggtgacgagatgttaaatgaggaacgagtcaagatgatgataaagctggcctcttatgaagaaggacagggaaaagaagattttaaagtgaacagctattatagaaaagattatgtgagtttccgtacaattgtcacattgatttggacgacgattgggtatggattggcagtcggattattttttcttgtgaatctggagaggatttttgaagacctgacacttgcaaagttttttttgcttggtgtgctggttgtgatcggatatattgcagtgctgatcatctatgggatgatggctggaagttattacaaaaagaaacataatgaagcaaaattgagagtaaagagatattacaggaatttatcgcgcctgagtaagatgtataaaaaggagaatatgtagatgaatagtttatacgtgtggaaagaagagatgcagaaattatatgcgcggtatgcaaaatatatcgataaagtacttcagctgattcttggaattctcgtatttgggatgatcaactctaagcttggctatatggaactggcggcatccaaatatgtgacggcaggtctgacagtgttctttacatttttgccatcagtgtatatggcggtggcagcagcagttttgattttgctgcatttgttttcgttgtcaatggcagtgtttgctgtaacggcagccgtgtttttgatgatgtttattttttattttcgattcgcaccggggacggcgactattttgttgctgacacctctggcatttgtattaaaagttccgtatattatcccggttgtctatgggttgatcggaactccggtctatgttgtaccggttgcatgtgggacaattgtttattttatgttgcattttgtatcgtcatcagcgactgcatttaaaggcagtgcaggcgcagagggattgatgaatgcagtgacagaatttacaaaacagatttttactaacaaagagatgttgatatttgtacttgcattttcggtgtgcctgctgattgtgtatgcaatccgcagaagttcctttgactatgcatggaaagtggcgatcgctgttgggattatcgccaatgttgtgctcgttgtaagcggagaacttgtctttgatgtacatattccatatggtggtatgatcggtgggaatatagtagcaggactgattgcagttgtgttggaattttttgtatttacagtggactattcccggacggaacagattcagtttgaagatgatgagtattattactacatcaaggcagttccgaagatttcagtgccggctccaagaaagacagtgaaaaagatcaatgagagacaagagacaacaacacttccggcggatgagatcagaggagcaggggaagtgtttgatagaaatgaagaggaggatcagcaggatcttcagagaatgattgaaaaagaattagaaaaatagtcttcaaaaataagtacaggaggtgataagatgggggcacagtttgagagattccttgaaaaatatatttccgcatggtatataccagagattaaagttgtcgatattattgagatcatcattatttcggtattggtctatgagattatggtgtggataaaaaatacaaaagcatggatgctgttgaagggaatgcttgtactttgtgcattcattcttgtcgctgcaatttttgagatgaataccattttgttcttggcgagccatgcgatcgatgtgctggcgatggcggcagttgttgtctttcagccagagcttcgaagggcacttgaaaaactcggagagaaaaatattttgtcttcggttgtgcctttggataagaagaaagagtctgtcagatttagcacagagactattgatggtattgtcagagcatgctttgagatgggaaaagttaagacaggagcgttgatcgttgtagagagagcgatcaaactgacggagtatgaaagtacagggatccgtttggattgtcttgtttccagtcaggtgctgatcaatatttttgaacacaatacaccgctccatgatggtgcgatcattatcagaggagacagaatcgtctcagcaacctgttatcttcctctttcagacaatatgaagttaagcaaggatcttggaacaagacaccgtgcggcagtgggaatgagcgaagtgagcgatgcgctgatcattgcagtatcagaagaaaccggggcagtttccatcgcgatgggaggacgtctggagcgtaatgtacgcccggaacggctcacagagagattgcttgatgtgcaggatcgtacggtagagcggaaacgtctgattccatggaaaggaaggcgaaaagatgaaagaaagactgacaaataatttggggctgaaattcatcgcagtgttcttcacaatagttttgtggcttgttgttatgaatgtcgaagatccgattgatacacggacttttaagggaatttctgttggaatacggaatgatgatattatcacatccaaagggaagacgtattcggttgtcggagagcagtctgtggaagtcacggttaaggcaaaaaaatctattttgagtgatctgaaggaacatccagaaaagataactgcatatgcagatatgcaaaatctggaaagcagggctttgattccagtagaggtaagtatcagcggatatgaggatgagtatgaggaggcctataccaatccgagaaatctggaagtagaaatcgagaattatctgtccaagagatttcctattgtcgcagagacgagaggcactgtgagagatggatatgtgctcggaccggtcacaccgaatccggcttatattacaatccaaggtggtgtcagcgctatcaatcagattaacaaagttgtggcaaaagcagatgtgtccggaatgtcaaacgatggagaagttccggcagaattgattctttatgatgccggcggaggagtcattgatcagttccagtttgaaacgaaccttggagaaaaaggagtatctgttgatgtggaattgcttgatacgaaaaacgtaaagctggatgtactatataatgatgccattgcagagggatatgtggtagaggaagctttgatcgaaccggctgaggtacagattgcaggaagaccggatgtgttaaaggaaatcgataagatcacaataccggcggaggcattggaaaatacagagatcagcagtcgtacggaagttggaatcgatgtgacgccatatcttccggaaaatacaaaactggtagatgagagtcagaaaaatattgcagtgacgatttctgtcagcgaaggtggaagcagaagaatccatataccggtatcttcgatcattccgagagaactggaagagggactgaaagtcagctttgattctgaacagatcgaattggcatttacaggttccgaagagaatttgaagaaacttgatgcaagcaagatcaatgtctatattgatatgaaagattataatacaccgggaaaatatcaagtagttccagtcgtggaaggatatggagactgccagtataagggcgagaagatcaatattacagtcgaaaagaaaaagtaaaaaacaggaggcagagatgatcaggcaggtagtgacaatcaagaatccaaccgggcttcacttgagtcccgccggacttctatgtaagacggcaatgcagtttgaatgcaagattacatttcaggcgaaaaattctaccgggaatgcaaaaagtgtcctgagtattttaggggcttgtgtaaaatccggagatgaggtagaatttatatttgagggtgaagatgaagaagcagcagcccgagagattatagagatgatcgaaagtggtttaggagaataagataaaaatagtcgagataaatgctcgactatttttgcaaaagaaaaggagaagaaaaatgaacagagcgacattggtaattatggcggcgggtattggaagtagattcggtggcggaatcaagcagttggagccagtcggaccaaatggtgagattatcatggactattcgattgcggatgcgatggaggcaggttttgataaagtcgtatttgtgattagaaaggatctagagaaagattttaaagaagtcattggaaatcggattgaaaaagtggtaaatgtagcgtatgcttatcaggagcgagaagatatcccagaacagtatcgcaagcaatttgcagagcgaacaaagccgtggggaaccggacaggcaattctttgctgtaaggatgttgtaaaagaaccgtttcttgtgatcaatgcagatgattattatggaaaagaagcatatgcagaagctttccggtatctgacagcagagaaggaacaatcagaaaagcaaaagctgtgtatggtgggatttgttctgaagaatacattaagtgaaaatggcggtgtgacaagaggaatctgcaaagtagatgaacagggaatgctgacagatattgtggagacacatcagattgaaatggtaccggaaggggcggcagtgcgtacagaggaaggaatgcagccgattgatatcgagtctccggtgtcaatgaacatgtggggactgactccagaatttttccatattttagaagaaggctttgaggagttcctttctcaaataccagagtcggatctgaaagcagaatatcttcttccaacgatcattggtgaactgttaaaagagcagaaggtggaagtaaaagtgctgaaatcacatgataagtggtttggggttacttacaaagaagataaagaggcagttgtagaagcgatcagaagccttgtggcaaatggggtatatccggaaaaattattcgggtaagtactagatagaaagaaagtagaaggcagaaaatacatgcatacaaaaataaaaaatactgtttggaaaggattggcaattttattgtcaatccttgtaattgttttgagtggtttgggaattgtattgttcaatgcatccagatgggtgatggatacgtgggggcttattacatttgatgagattatttttcatctgaaggtaccgatggagggaacaaatacggatatgatatttgattttatcaatcagtgtcttccggccgcaatcttggtaatgttattagaactggcaatttttattgctttcagaaaaaggagaaaaaaatatgctgtagtttgcacggcgggaatcgttggggcagttgtcttatcggtgagtgcggcaaattatctctgggtgaatctggatattggaacgtatctggaaacacaggggaaagattcgacatttatccaggatcactatgtagatgtgaaaaatacagaacttatttttccggagcagaagcggaatctgatctatattttcctggaatctacagaagcgacctttatgggaaaagaagatggaggcgcctttgatcaaaatgtgattccgaaactgacggaggttgcaagaaataatattagtttttccaattcagacttattaggaggagggcatgcggcttttggggcaacttggacaatgggaggaatgtttgcacagacatctggattgccgttaaaacttccaattgacggaaatgccatgtcagatcaggaagtgtttatgccggcggtcacaagtattggggatatcttgaaagagcagggatacagacaagagcttttactagggtcagatgcagtgtttggtggaagaaaaaattattttgaacagcatggagattatgagatgctggattattattgggcgagtgaaaatgggaaaataccaccggattatcgtgtgtggtggggatatgaagaccagaaattattttcaattgctaaagagcggttaacagagatatccgctacaggagagccatttaattttacaatgttgactgtagatacacattttgaagatggatactattgtgaacagtgccagccgattacaggaaatcagtatgcggatgtgtacttgtgttccagccatcagttgcaggaatttatcacatggatacaacagcaaagtttctatccgaatacaactattgttttatcgggagatcatttgacaatggacagtgatttttgtgcagagattgatccctcttatgatagaacagtttataatgcatttataaattctgcagttactccggctcaaatgaaaaatagacaatttactacgatggacatgtttccgacaacacttgcgagtatgggagtaatcattgagggtgatcagttaggacttggaacaaatcttttttcggaaaaacagacgcttgcagaaaaatatggtatggatactgtaaatgaagaactggtgaaagattcgaagtttttcaataattttgtcagtgatattaaagtggaggaaggagagtaatctatggagagagcagttggaacagagccaaaatcaatgggaagagtgattgggttgctgtgtatggtcgcggtgatgctcatttggggaatgaatgtaaaggcggcagggccggaagaaatcgagtatgtatatttggatgaagatgttgtgggaatctcaggtgtgcaaaatattgttgtcggttttcaaaatgagaaaatgatgatcggaggcgcgagattattatatcagacagaatccggaaccgaaggtacagtggaagccgcgcaaatcttaaataacacagttctctttcagaagcagacgatggaagaaaccggcacatatcagatcacgggaattgtatacattgatggagaaggtctggaacagactattctgttttcggaaaagggaatcacagcctcttttcaagttgtacaggatgaggcattgtctgtttcagagtcaggtgctcaggtagaaacatattctatgacagatgacaaccagctggtgcaggcaggagcagaaacagcagaagaagcgatcgctgcgacactggaagaggcgggggtcaatgaggaagttgctcagaacgcaagaagcggagaaagaaaagaagtggttgttgccattggtgcaggtcatgatgcaaatcacccgggagcatccgcaaatggactgcgggaagaggtgctgactctgaaagtggcaagatactgtcgggaagaattatctcagtacagcggtgtcagagttgtgatgcttagagacagtgagagctgcccttataattcaagttcaaattattgtctgaaccagagagtatacgatgcgaaaaatgcaggagcagatttgtatgtagaccttcacttcaacagcggcggaggaaccggggcagagatttactatccaaataaaaactaccgcccggatctgtcggaagaaggacttagtgtgtcaaataaaattttagagcagttgtctgcgctgggacttcaaaacagaggagccaagatcaaggacagtacactggcaggatcatccggtcagtatccggatggaagcaaggcagattactttacgacaaatgtactggcaaaagaacttgagatgacagggattattgtagaacatgccttcctcgaccacggatccgatgcggcaaaacttcaggacgaaaacttcttgagacagttagggattgcagatgcgacaggaatcgctcagaaatatgggttggtgaaagggaacgaaacaaagcaggggctgaatctgaaagcacatgtacaagaacttgggtggcagagtactgtgggagatggagaactctgtggaacaactggaagagcacttggcttagaagcgcttcagatgagcattgctggaatggaaggcgtagggattgagtatagtgcccatgttcgtgacattggatggcagggaaccgtccgtgatggtgagacagcgggaacaacaggaagaaatttacagatagaagcattgaaaattaaattgaccggaagcaacgcaacaaagtataatatatattaccgaggacatgcctccaacataggatggcttgactgggcaaaagacggacaggcagcgggaacacagggatatgcttatcagttagaagcagttgaggttcggattgtaccggcaggaagcgccgcgccgggagcaacaaataggccgtttttagacaaaacacaggaacagccagcggtgacactttcttatcaggcacatgtttctgagattggctggcagaatgcagtgggaagcggagtaactgcgggaacagttggaagagcacttccgatagaagcgctcaaagtgaatttaagtggaatatcgggcattcagtatcgtgcacatgtctctgagattggttggcagagcaatgtgacaaatggaaagatgtcaggaacaaccggaagagcacttccgatggaagcattggagatgaaactgactggcaatgcggctgcgaagtatgatatttattacaggacgcattgtagagattttggatggcttgcgtggacaaaaaatggtggaaagtcagggagcgcagggtatgcaaaatctatagaggcagtagaaatccaattgattccgaaaggacaggtgggtccgtctacatcaggtacagcttttaaagagcgataaaagtaaaatgcatcagataggaggtaatatgaaaaaaacaaaaagaaaagttgcggcatttttgttggctgtgggcatgagtctgacgagtattcctatgtcggcatatgcacaagaggtgcaggaaccatctaatcaggaacaggaaagccaagaggttgttcaggaagaaaaggaagaacaggcagaatctgttgaagagcaggagacagtcgagtttcagggagaaaatccggaaagtaatcaaacgattacgagtatggatcttgatggaaatgttacagaagttgtaatcgaagatggaacagtagatagttacgctgcagaaaaggcaaggattgggggaggacagattgtcaacttcaatacaggaagcggtggtgtgacagaatatgtagaagaggggacaaacacttcaggatatacacatggatcgtatggagcggatgccgcttaccttgggacaagcggcgggaaagtaagatttatgctgtctggggttattggccttgtagatgccaataaagttcaggttgtcagtgcagcagcagcacaatctgtaagttattatgctgtcacaggaggaagactgattcattatattacgataaatgtaaataaaagttcctatgcgagtgtactcgataatggggcggctccgtcttatttgtcagagggcacaaagtattacagctatgatggacattacttttatccagaatcagcatttcaacagatgttggaggattataaaaatgggaaccgaagcagatcggtaaatgcaagtgcgccatattacaattattatcaatatcttccgtttcgaagcacaacgaattatggaagtgatctgaatgcgatgattaatgcgagggtaactgcaagttcaaaaatgagagatctgggaaattcgtttatcaatgcgcagaatacatatggaatcaatgcattgcttgctgttggagtagcagccaatgaaagtgcatggggatccagctggattgcacagaataaaaataacttattcggtctgaatgcgattgatacttcgccaggacagagcgcagattattttgccagtccgacacagtgtgtcaatgaattcacagagacatttctttcaaaaggatatatgaatccacaggattggcgttattttggagtatttctaggaaacaaagcgagcggagtgaatgtaaaatatgcctccgatccgtactggggtgagaaagctgcaaatgtagcctggagtttagataaggcaaatggtaacagagatgcggggaaatatacaattggagtcaaagatacgctcagtaatcagcatacagatctgaatgtgagacaggagagaagcgcttctgcaacaaaagtatattccaccggcacacaatccagccatgcgtttattctactcgaacaaaatccaacatccggcttttataaaattcagtcagatccagtattaaatgggagcagaagcggaattcattccggaagtggtcggtatgactttacaaacatgtatgcttatgtaagcagcgattatattacaaaagtttctatcggaaacggggattcaggaaacagtaattctggtaatggaaattctggaggcaacaatggaggaacatcagtggatcccgtgtcagtgccggaggctctgaaaaatgtgatcagttactcagctcatgtacaagatatcggttggcaggatgcggtatcaaatggtgtgatggcaggaacaaacggaagaaatcttccgatggaagcgattaaaattcagacaagcggtgtggcagggctaggtgtgaaatacagtgcacatacgagagacttgggatggcttgaatatgtgagtgacggaagtgttggcggaacaacgggacaggcgaagccaatcgaagctattaaaattgaactgacaggagaaaaagcggcagattatgatatttactaccgggttcatgtacaaaattttggatggcttgattgggcggataatggtactgctgcaggaagtcaaggatatgcttatcatatagaagcgattcaaatcgcagtgcttccaaaatggagtagtgcaccagggaaaacagatactccgtttcaagtgaaatccgtagatcttcagtaccgtgcacatgtatctgaaattgggtggcaggagtatgtcggaaatggaacacttgcaggaacggtaggtaaaaatcttccggtagaggctcttcagattgcagtgaaaaatgcgggcaatttaggaataaagtacagtgctcatgtaagagatattggatggcaggattacgtaaaagacggccagacggcaggaacaacgggaagagcactctcagtggaagctcttaagattcaattgaccggatcggcagcggctaattatgatatttactaccggacacatgtgcaaaatttaggctggctcgattgggcgaaaaatggagcagcatcaggaagcgcagggtatgcataccatgtggaatctcttcagattattattatgccaaaaggaagtgctgcaccagggaagacggcgaatgcttttcaagagaaagggatagaaatacaatatcaatcacatgtacaagacatcggctggcagaactgggtaaaaaatggcgagttgagtggcacgaccggacaggcaaaagcgattgaagcaatgcatatttcccttgtaaatgcaacagcaggaggaaatatagagtaccgtgcacatgtgcaggatattggatggcaagattgggtgaaaaatggagcgcagacaggtacaaccggaagggcacttccgatggaagcggtgaatattcgcctgacaggagcgttgtcagaaaaatatgacatttattacagaacgcattgtagagattttggatggcttggctgggcgaaaaatggcgagtcagcaggatcagaagggtatgcaaaaaatatagaagctatagagatcaaactggtcaaaaaaggagagcagggaccatcaggaggtggaactgcctttaaaaagaaataaaagcaaaaaaatggcggtgaatatccgtcattttttgttgtgattctttattgagaatcaatgaaaacaatggtataataacttgttagtgtagaaaagattaaaaaaatggagaaaaaatgaagaaaacaatcattcaaaagatatttatctcagatgagacaactacaaaaagtaattttttgtggaatacgattggaacgggaatgttggccgcagctactatgctttttactgtgattgtggcacatctgtcaggagagaaagcaggagggctgttttcttttgcacttacaatcggacaatggattggaacaattgcatattttgaactcagaacatttcaggtaaccgatgttgcaagaaggcactcgtacgctgaatatttttatgcaaaagttttctgttgtatactggcggtgctggcaggaggcggttatataatgctccgtggaggaacagtggagaaggctttctttatctttctgctttgcatttataaaattttggatggatattcagatctgtacgaaggagaacttcagagatatggtcggattgacgttgcagggaaattgttgttctggagagttgccggaggaattttgattctgactgcagggattttacttacacaaaatctgaccgtggcggttattgccatgattgtatattctttattgatgatttttgttgtaaatgaaaaagcacttagagtttttgaaaaagggaagctgacatttaggaaaaaggaagtagggactgtcttgatagaatgtcttcctctatttctcagcagttttttgaacacttatgtatacagtgcttcgagaatgtccgtggataaagtgctggatgcaaggtatcagttgtattatgcggcaatttttatgccggtaatgatcattaatctatttagcacatttgtttttaaaccgttgctttccgttatggcagaagactatgaacagaagaggaaaagacagttttttctcatgattgttaaagtgtgtgcaattattgttgcagttacggtagtctgtgagataggtgcttatttgctaggaattccggtattgtctattttatatggcatcaatttgggagcatataaaatagatctgctgattctgcttcttgcaggtggggttaatgcattggcattttttatgtattatattttgactattatgagaaaacaaaactatgcgttgattggttatggaatggaagcggtgacagcatttgtcatttcggattggttagtcagaaagtacgcaatcagaggagcaagtgtgagttatctgatagcggtaaccgttttattgacaatctttgtgctatttatgatctataatctatggagagggaaaaaggaaaatggaaaataaacatacatttgctatttgtgcatataaagaaagtagttttttggaagaatgtatcgagtctttaaagaaccagtcgattgagagtgaaatatttattataacatcaactcctaaccgttatattgacagaacagcggagaaatatggaattcctgtatatgtgaataccggagaagctggaattgttcaggactggaattttgcttataaaaaggcgcagacagaatttgtgacaattactcatcaggacgatgtgtattttgaaaaatatgcggagcatgcagtgagagaatttgaaaaatcttcaaagccattgattttctttacagactatgcagaaatgcgtaatggagaaaaagtgacggataacagactgctccgaataaaacgcctcatgcttctgcccttaaaagtgaaagcgtttagaaaaagtagatttgtgagaagaagaatcttgtcgttaggttctccaatctgctgtccatcggttgcttttgcgaagaaaaatctgccggaaacagtatttaagccgggatttgcttcggatgaagactgggaggcatgggaatacatatctagattcaaaggtgaatttatatatgacaaagaaatattggtaggacatagaattcatgaagaatccgaaacatcaaaaatcttagggaacaatgcgagaaataaagaagactatacgatgttctgcaaattttggccaaagccgattgccaaaatactggcaaggtggtatgcggaaagtgaaaagtcaaatgagttgtcgtaatgtggatgggaatgaaatatggaaaaaaaattaaataaggcagaaggttatagaaagcttttaaagattgttgttacacttttggtgctcattggtctattaggaatgatgtattctgatgaagtaaaaccgattgcagaacagagaatgcaatatgtaaaaagtgaagtaaagggaaaactattagaactaaaaagtggggaaatactttctcaaaaggttgagatgcagagtgattcttttgaaacgattcaaatcatgtatcaaaattttcagggacaggaaacagatgtactcacattagaaatagaaaatactgaaggggaaattattgggcagtgggaactgcagctgacaaacgaggtgattgatcatcaaacagaaggaattaaagtactgcaattcaatgccgatgaaaccattcatataaaagacagggaagtatatacactaaatttagaattgtcgggttttccggaagatcgactttatttttatggaacagagtcccttcatgataaagcaaatataaatggaagtgagaatgaacaggctttggctgtaaatgttttgggaggaaaagcaggaggagttcgatatttcttttttggaatagcagtgctgactgtatttggaatgggaattatcttggtgctgttacttagaagagagtcagtagaaaaaatctttgtggggagcgcacttgtatttggagtgatatatatgttagttattccaccttatgcggtcccagatgaacaggctcattttgtgacagcgtacaataatagtagtgaaatattaggaaaagaaactgtaaaagatggcaatcaggcagtgttgcaggaacgggaaatacttagtgatccatcaggacattatctgacaaaagagagatatattgaatcaatgaatggactgctgggaaagacatataatcacagtggggaatcagtgctaggtggaaaagtgttggatatgcctaaaatttcatacgcaccccaaactttgggaattacagtagcaaggcttttacatttcaatggaattcagctattctatatgggaagaatgtttgcattgatcacatatgtggtgataacgtactgggcaatcaaaatcatgccgtttgcaaagatggtattatttgtcactgcattattgccaatgtccatgcaacaggcgatgtcatacagttatgatatgttagtaaatgcaattgccttttttatgattgcatacttcttccatttgatttataaaaaagagagagtggagaataaagatattttaatcatttctgtatgtactgcaatcatagctccgattaaagtggtttatattgttattataggactgggaattttgattccatatcaaaaatttggaacgaaagtgaaaaagtggacatgcgcttttatattaggattggcaggagtgattccaactgtcatcactcggattgtaagtatggcagatatgattggcggaagtcagggaaattcggaattacttggatatgaagtatatggaggagtatattttttaaaacatctaggagaacttccgaaaatttttatagaaacagcaggagaaatgacaagttattatgtgaatacaatgatagggaaacaactagggtggcttgaaatagagatcccttatcttgttatagcaggatttttagtgttacttttgatttcagcagcaagaaaacgtggagagaaggaaatgattaacatgggaagcaaagtctggatagggattttgtcaggcttatgctacattctcatttgttttgtgttgttgattagttggaaagaagtaggagagcaagtgattgccggggtgcagggaagatatttccttccagttgtgcctatgattatacttttattcagaacaaaatatatagtggtagacgagaaatttgaccgtgtaattatgatgtcaacggctattctggagattgctacggttttatcggttcttcacatagtacttccaagataaaaaggagaaggtatgaaaaaactaataattatacctgcttataatgagcaggaaagtataaaaaaaacagtagaagatattatggaaaaggcaccgcactttgattatattgtaataaatgattgttctacggataagacaaaagaaatctgtgaaacagaggagtttaatgttattcatttgcctgtgaacttaggaattgggggtgcggttcagacaggatatttatatgcggcaagaaatggatatgatattgctgttcaggtggatggagatggacagcatgatccacagtttctgagtaagatggcagattatatggaagcagaacatgcagatatggtgattggttctcgatttatagataaagaaggatttcagtcatcaggagctaggcgcgttggaattaaatattttacaatgctgattaaattgcttacgggtacaaaaataactgatccaacttctggattaagaatggtaaatagggagattatagaattctttgcggaggaatatccaaaagattatccggaaccggagagtgttgtagctattctgaggagaaagaaaaaagtgctggaaatacctgtgatcatgagggaaagaagtggaggagtatcttctatttcgatgaaaaaatcagtatattacatgataaaagtgtcactggcaattttgattgaaagaattcgcaaataggaggataggaagatggacatcaaaatacagctgattgtagccgttatcattgttattgcaatgggaattgtggtaatgatgattaaaaataagcaattagagttacggtatgccttgtcgtggtttgcacttggtgtagggattcttatattggactgcttcccggatctgatcacagaattggctaatatgatgggaattggaacaccaattaatatgttatttttctttggattttgtttctctttaatggtgatatttgtattgaccgttgtggtgtcaaaactcacagtgaaagtaaaaagactgacacaggaaattgcaatgtttgaagaagaaatgaagaaaaaattgcaggcaaaagaagactgtaaataggggaaagcgcgtttttacttgaatctgcaaaaagttgatggtataatcggtaataaatagagtaagatggaggataactatgagaacatatttagtaacaggtggagcaggattcattggttcaaattacattcattacatgtttaagaagtatgacaatgaaattcggatcattaatgttgacaagcttacttatgcaggaaatcttgaaaatttgaaagatgtagaagatagagagaattatacatttgtaaaagcagatatttgcgatgcagaggcaatcaataagatttttgaggagaatgatattgaccgtgttgtacattttgcggcagagagtcatgttgacagaagtattaagaatccggatgtgtttgtaaaaacaaatgtacttggaacattagtgatgctcaatgcggcaaaggctgcatgggagttagaagatggaacattcaaagaagataaaaagttccttcatgtatctacagatgaggtatatggatcactggaagaagaaggagaatatttctacgagacaactccttatgatccacacagcccatattcagcaagtaaagcatcttctgatatgcttgtgaaatcttatatggatacttataaattccctgcaaatattacgaattgcagcaataactatggaccttatcagtttccagaaaagttgattccacttatcatcaataatgcccttcaaggaaaaccacttcctgtatatggagatggaaaaaatgtcagagactggttatatgtagaggatcatgcgaagggaatcgatatggttcaggaaaaaggaagattattcgagacatataatatcggtggacacaatgagaagcagaatatcgagattattcatattattcttgatacacttcaggagatgcttccggaaggcgatccgagaaaagaacttgtcagtgaaaatttgatcacatatgtgacagatagaaaaggtcatgatagaagatatgcgattgctccggataaaattaagaaggaagtaggctgggttccagatactatgtttgcagagggaatcaaacttacgatcaagtggttctttgaaaatgaggactggatgaaaaatgtcacaagcggtgactatcagaaatattatgaagaaatgtataaataagaattagaagaccgtacttttgtatgcagatgatagtatacaaaagtacggtttttaagtaaattaaaaatttttcctgagtttatttaatgcgtgacgaagaggagcagtaattttccatgaagtagaattagtaatggtattgagtgatgaggataaataagtcacctgctcctgaagttttttcaaatgactctcgcattgctgaagctcttctgtcaatgtttggattttatctgtgtgatgtttcgtatttaataaagcggtttgaacaaatgagtcacagaaaatgtgttggttactgagtgcatagtaggaaattggagtaaagtgataggaagcttcaagaacttcagcagtttttggacaggctaacagttctccgagcttcatgattccaagaattggattttgttttccaccgtatttgcaatcgcaaagtaaaaatgcctgttcgcagagaagttcttccggagtagctgcgtgaggattacgaaaataagagtgaaaagtgcgtacaaataattcggtatccatattttcaaaaaagtggttgcggatcagtaaatattcatttaagtatctggttgtatcagattctgtggtggaacttgtatttaaagtggaggaaaataaaaatcgtcgcatgatagtcagattttcctctataacaaaaataggatattttttggcaatgcggatccagtaatcaaagtcgtgagcttgtcggtaagcgggattgaagtctccgatttctttttggatttcggttttcataagcacggaaggatgagaaaggcagtttccgtgaatgaagaagaactccaaccagtgttcctggcaggaagggtgtctgccgttgaataaattgtaaagatctcgttcggagtcgttaagatcattcccgttctcatcaattaagtcagtccatgaaaagcagacgctgcaattcgggtttttttgcatgaactccatttgtttttgcagtttatcaggataccaaaggtcatcactgtcgattctggcaagatactcaccggtcactttgcggaagccaaaattggtagcatgacaaatatggcggtttttctctaaaaagtaatattcaatgcgaggatcctttttggtataatcttttatgattgtctgggagcggtcagtagaaccgtcatcgacaatgataaattgaatattctgataggactgtgacaaaacactttcaattgttaaaggaagatgagattcatggttgtaatttaccattaaaacacttattttttgattgaacataaaacacctctcgattctgttaatagtgtcagcgtatcatgggaagagaaatttgtaaagtggtatgaatataagaagacggggaaaagtagaaagagtgagggggtatagaaatctgaagaaagtatgaaaaaaatctcagagattgaaaaaggcggaaggaagtgctataatcccatctttgacagttgaaaaatgaaaatgcggctacaagcccagtaaacatgggcggtgtagccgttttcttgtttgcaacgatatgtgctatttttctatttgttctattttttctgttttgtttcttttatgatcgtcctcatagtagatttgcgtatgcattcataatccgtacggaacccaaaggaactatgtagtttgtctgttatctttgtacgtttgtaagaaggaatgtagccactgtctttggataaaagtgtaacattcatatttcttaatgtttctaaaatctgactgcaggtaaactcttctccaagtttcttttccaataatcgataaactaataggctaatgaagcaggtcaggaaatgagctttgatgcgatcttcgcgtctaacaaatacaggtctcgcttcgaattctgatttcatgattctaaagttttcttcgatttcccagcgttgtttgttgatattaataatctctctgatatctccctcaagatttgtaaccactgcataaaatccatcatacatagactcttctaggattttagcttcatctaattgataaatatttttttgagctatttcaccatcttctgtgactgaggttctttgaatgaaacgagctggatcatttgaaccttttccttttcgggttttatctgaagattgtatcatttttttcgctcgatcaatctgagcattacgaatcttactttgataagctttatattttggcgaataggtgataatgaccgtttcatccatatctcctgttacaagcgggtattctttataataaatagtgttgtatacctttggatcggattcatcaagtgtccgcaagtcaatcagtttgttggaaccaggaaccttaaactgagttggcaagagtgctaactcacgttcttcctttttcatttttttcaaagaataagtaatcacataagagcgattaccaaagctgttcagaaaacgattgctttttccacctaaaccagcatctgagcaaaaaataaattcactgcaattaaaatctttgatgactttcttttcgattggttttaatgtaagttgttcgttttggtttcctggaaatatatcgaatgccaaaggaattccatctgcatccataaaaagccccatggttatgattgggtttggacgatgttccttactttttccatatttttttatgccatcttcagcttcaatctcgaaataatagtttgtgcaatcgtaatataaaatcttggaattccgtggatgaataaaattggaattcttgtataattcttcctgaataaagtcagactcttcggcgagaatagacagagcgcgataaagatcctggagtgaatactttggcggttctaataaggaatgacagtacttataactactgagtttactagaaggcgccagaattctggcataaatcaaatctgtgaggattgcgtggaaatcataagaaaacttatgatgattacgtatatttctgcaaatgttatcgattcttagctcactgcatatcttctgtaaaaacaaatatccgatattaaatacacgttcttcgtcaagtggaatgcgagcaagaggagacaaagaaagggagactttttctttttgctgattgtaagcaatagtttccttttcggcttctttttttgcccagtccatcaactctttttcattgcctgaaaactgttctaagagagtattatattttccaagttttttataaatacgagaagatgtttttccgttatcttttcgataagattgtttgatataaacatcttgatttcctttatttccggtaatagaaacatacatctgataattcctccaaccctttttctttattataccacaaatagtacaaaatagcacgtacaaaatcataaaatttgacgaaaaaataagccatgaatggcttaaataaggggtttctaaggaaagttataaaaatgatgtgtcaaactcccgtgagggggtatagaaatctgaagaaagtatgaaaaaaatctcagagattgaaaaaggcggaaggaagtgctataatacaacgtgacttaatgtgcagttgcagaaaattgcagattgccagtactaggaaagctataagattaacgcatataaaatgtaggaggtacttattaatgaaaggtattattttagcaggtggttcgggaacaagactttatccgttgacaaaagcggtgtcaaagcagattatgccggtctatgacaaaccgatgatctattatccgttatcgattctgatgctggcagggatcagggagattcttgtaatatctactccgagagatcttccggtgtttgaggaactgcttggaacaggagaagatttgggattaaagatgtcctatgcggtacaggaaagtccaagaggactggcagatgcatttattatcggggaagaattcatcggaaatgacagtgtggcattgattttgggagataatattttctatggtcagagcttttcaaagattctgcgcgatgtggcggccagagaatcaggggcaactatttttggatattatgtaagagatcctagggagtatggcgtggtagagtttgatgaaaacggaaaagcactttcaattgaggaaaaaccggagcatccgaagtcaaactatgcggttccgggattgtatttttatgataatgatgtggtggaaattgcaaagaatgtaaagccgtctgcccgcggagaaattgagattacaagtgtcaataacgcttatcttcagagaggtgatctccatgtagagacattaggacgtggatttgcgtggctggatacaggaaatcacgatgcacttttagatgctgcagactttgtggcggcgttccagaagcgtcagggactttacatttcatgtattgaagagattgcttacaaaagaggatttattgacaaggagcagttgatcaagctggcacagccgcttttgaagactgcatacggaaaatatttgatggagatcgcagaaggattataagaaccgcctgcaaataaaaagaaagaaggaaatttcaatgggaaaaattacagtagaaacatgtgaaatcgaaggattgaaagtgattaccccgacagtgttcggagatgaacgcggatattttatggaaacatataattacaatgattataaagaagcgggaattgatatggaatttgtccaggacaatcagtcaagctctaagaaaggagtattaagaggattacattttcagattaattttccgcaggataagcttgtgcgcgtggtgagcggggaagtgtttgatgtggcagttgatttaagagaaggatctgagacatacggacaatggtatggagtgcttctctctgctgaaaataagaagcagtttttcattccgaaggattttgcgcatggatttttagttctttctgacacagctgagtttgcatataaatgtactgatttttatcatccaaatgatgagggcggacttgcatggaatgatccggatatcggaattgagtggccgatcccggaaggaatggaactgatagtttctgagaaagatcagaagtggatgggaatcaggtctttggagagacagtaatacattgtggaggtagaatagtgtctagatatatacaaaattttatgaaattccaaccactattgaaagaattagttgcaagagatataaaaacaaagtatagacggtcagtgttgggagtattgtggacactgttgaatcctttgtgtacaatgattgtgctttcagtcgtgttttctaatttattcaagtttgatgtagaaaattactctgtataccttttatgcggacaagtaattttcaacttttattcggatgcgactacaaattctatgggagctattataagcaatgcttccttaataaaaaaagtttatgttccaaagtacttatttgtattatccagagtattttcgagttttatcaaccttctagcatcatttacagcagtcattcttgttatgattgcaacaaggacagagttgcactggacggtaatattggttgtaataccattgacattaattgtatttttctctatgggagtcggaatgcttttggcagcgattacagtaaaatttagggatattatgcacttatattcagtttttgtcacggtaattatgtacttgactccggtaatttatccaatgtcgattcttcctgagtggttgaaaccaattgtaatgatgaatccattgactaatatattgacaatgtttagggatgtgacaattaataataatctgccacaactttcatccgttgtcatagcagtgattgagactgttgttatgttacttgttgggacttacgttttttataaaaatcaagatgagtttattctgaatatttaggagaagtttagtatggaaaatcaggcaatcattgaagtggatcatgtgtctatgaaatttaatttggcggccgaaaaatatgacagtttaaaagaatatattattaaaagtttaaaaaagcagatatcgtatgatgaattttgggcattgaaggatgtttcttttcaattgaacagaggggactctctgggactgattggattgaacggaagtgggaaaagtacgatgttaaaaacgattgccggagttttgaaaccaacgagaggaagtgtaaaagtaagaggaacgatagctcctttgatagaactcggggcagggtttgattatgacctgacagcaagggaaaatgtttttttaaacggagctatcctgggatatgggagaggcgacatggaaaagcattatgaggatattgttgaatttgctgagttgcaagaatttatgaatgttccagtgaaaaatttttcttcgggtatgatttcgagactggcatttgcaattgctacgattggtacaccggatatactgatcgttgatgaggtgctttcggtaggggatttcctatttcaacagaaatgtgaacagagaataagaaatatgttaaataaggggacaaccttattatttgtatcccataacgtgaatcaagtcagaagcctttgtaataaaattgtgtggttggaaaaagggcatttgcgtgcgtttggagactcagaagaaatttgtgaagagtatagcagattataaaaatggcaagaggtagaaaaatgaaaaagcagataaaactgtttgccggttgcattgtactgattattgtggcatatgcatatgcacatattgcaaaaaccgtaagtatttatgacaagggaatagacccgagtcagtatggaagtacaggaattattatagatcaggcggtaagccaaagttttgtagtagaagaaaatgcaatcgacagtgtgagaattaaaacttctgttgtagggaatgtgaatgatatttctctttcttatgaaattaaaaatagtgagacaggagagatttgtgcacagggagaagcggaagcggaaaaggtgaaaaatggaaaattttttgaactgaaatttcccaaagtcgaaaatgtcaaaggaaagaagatggaaattactattcgggcagaaggagcaaatgcagaaaatggagtctcttttgcttttgagagaaaagtcgagaataatacagaatataaagtgaatggacaagagcaggaagctactttgattttgaaaacagtaaatcatagatttgattttgaaacattttctgtgttcatcggatttgctgtatatatttatgtgtttatgcgatttttatacaaattatttcaatagaagagtaggaagtaaaatatggggaaagaaagtgtatctaagaaatttgtttatattgcagtaatttttggagtactcctgacgatattgattccgccatttcaaagtcctgatgaagatagtcacttcaaaaaggcatttgttatggcggaaggacgtttttatccagaggtgcagaaaggacagcagggatactggctttctgagaatatggtagaatatattgccgataaagtcgctgcatgcggagattatggtagaaaattttcttatcaagaagtcatggagtatgagcgtaatgatgcgaattattcagatacgaagttttatcagttttccacaatggagacacgcccaattggacatattattccggcaacgggaattgtgattggaaaggtaatcgctaagatagcgggttttgcttctccttccgttgtttactatttgttttttgcgcgacttgccaatttagcattttttattattgccatagcacttagcatacggattacacctatattaaagagaactttttccggaattgctttaatgccgatgactttgtatctggcagtttcaccatcttatgatgtacttttaatcagcagttcattcttgttcgcagcggtggtgcttcggctcaggtatgacaaagtagaaaatggaaaagtcagaataggtcatattattttttttggagctgttttttatttgtatattgcgttaaagattgtgtatctaccgttgggattgattatgctgttttttataccaaaggaagtttataaggataagaaggtgattttaaaacatgtcatacttttatcggtggttgtaataggcacgtatttaataggtaaaattccatatttgatacaaaaaaatattttgacatcaggagatccggctgttggcagacagattaggtttgtcctggaaaatccagtccagtatgtgaggatattttgtcagacattatggagccaaaggaatttttacatttccacaagcattggagtgtttggactgttggatacatggatgtattcggccgttatatacatatatgcaggatggttatttgttgttggaatttccgaaataagcattgataatattaaagttacagtatggcaaaggctttcggtaatcattgctagtgcagtttccgtatttggtatctttcttgcaatgtatatttactggacgtcgattatgtcaggatacggaccaggggcagaggagatagtaggtgttcaagggcgatatttcattccattatttccaatgttttttttggtttttgcaaatcagcgcattgttaaatataaaaaaggtagaaacatttgcaaagtgattgcagaaaacagtatattagtttctttggcagttctcccagtaatgtgtcttatgttgctattaagattctgggcataattagcctttaaaaataggagtagatatgattaataaattagtacatttaagcagaaaaggtgtcaaaagtcttgtgacaatgggacctgaagaaactatgaaaaagattgtaaaatttagtaaaaagcgctattttatgaagtatggaattaataagcttcatctcactcctgcaagaatactggaaaagcagagaaaggacatttctatctcgaaaataaaatttagtattattacaccattatataatacaccagagaaatttttacgagagttgatagaatccttgcaggaacagacttacgaaaactgggaattatgtttggcagatggaagtgacagggatcatctttatgttgaaaagatatgcagaaggtatatgaaaaatgatcataggataaaatatagcaggttgactaaaaataatgggatatcagagaatacaaatgaatgtataaaaatggcgagcggagattatctaggactattagatcacgatgatctcttacatccagcggcactgtatgaagtggctaaagttatagagcaaaagaatgcagaatttatttatacggatgaggttaagttctcagaaaggccggagcagattatgtctgtatcaaattttaatttcaagccgggatttggaaaggatgagctccgtgcgcataattatatctgccattttactgtatttgcaaagaagctactagataaagaagaaaaactttacagaaaagagtatgatggaagtcaggatcatgatatggttttgagattgacagaaaaagcacatactattgtccatattccaaaagtgttgtattattggagggtacacagtaattctgtgtcaatggatataggaacaaagccatatgtagtagatgctgcactaggggcaataggatcacagttggagagatgtaaagagcctggagaggtcatgagcaattttccgtatcagacgatctaccggataaaatacgagttgaaagaaagccctttggtttcgattatagtgcttaaagataaaaagaactgtaagaaaccagttactgtccaagaaattttaaagaagacacattacagaccgttggaaatcattgttgaagatagtgttgaagaagtatgtgaagaggatggagtgcatataaaagcagttttaactcagggagtaaactcaaagggaagcagaatggacaagatgctttctgagagtaacggcagcgtgattgtactaacagaagacactatgcaaccggattctggagaatggttggaagaaatgctcatgtttgcccagagacaggatgttggaagtgtaggggccaagatttttatgaataattctaaaatatattatgcaggtggcgtaatagactgggagattccggaatgcgtgaaatatatcggaaaagacagagaaaaaaatgatgatggatatgaagcaattttgactcatgtgcggaatacaagtattacactctcaaagtgcatgatgtttcaaaaagagttatggatcttgtatggaggatttcaaaatgcaccgtcggggtttgagacagaagatttctgcttgtggctcattgaccaaaagaaaagaaatgtatggtgcagattttcagaatggacttgttgtaatgcggaaatagaagcagagaaagatggacctgcttttagagaaagatggaaagatacttttggagaagatgagtattatcatccaaactggaaaaaactgtcattggtataggagatagaaatggaagatattagtattattgcaaaaaagacatggaaagcactgagagaagatggaatagcaggaacttataggaaaacaagaagttacattcacacggcaaaagtcagaaaacaactggcacagtatgaaggaaaggtatgtggggatgtactgttcatcaatgggtgtgattatactgcgttacctcatccgccaagatatagggttatgcatcagcaggaacagctgaaggcaaacaatatggagagtacagagaacttttatttgcaccttaattttgatcaggtacgttgctttcgtgtatttattttctttagatgtccatacacagaagaaataggtgaatttatcaaaatggcaaaaagcctgaataaagttgtcatttacgatattgacgatttggtaattgatacaaagtacacagatacgataaagtatttggatacaatgtcaaaagaagaaagaaaaggatatgatgaaggtgtaaggaatatgcagaaagttctgaaaatgtgtgatgctgcaattacaacaacagaacgcttggcagaagaactttctcagtatgtgccaaaagtttttattaatcgaaatactgcttcagaggaaatgctggaactttcagagaaagcaatttatgaaagggatatattgccatatttagaagaaacagcagtaaaagaggaaaacaaaaagtgttatcttgagaaaaaggagcagcagcttgtaagaaaagatattgtcaggatgggatattttagtggaagtattacccataacgatgattttattttagttcaaccagcgttaattcgactgatgagagaattccaaaatacagaattacatgtcgttggaattcttgatattccggaagagatgaaagaatttgaaggacgcattataacacatccattttgtgactggaaacagctgccggaacttatatcacagatagatattaatcttgctcccttggaagaaagcatttttaatgaagcaaaatctgaaaacaagtgggtagaagcggctctggtaaaagttcctacagttgcaagcaatataggtgcatttgcaaagatgatagaacacaatgttaccggtttactgtgcaacaatgaagaagaatggtatcagtcgttgaagtgtctgattacagacaaggaaacaagaaataagatctcagagaatgcctataatttttgcaagaaaaagtgtgttacactgtatacaggatttcaacttacaaagtttatcaagagtatgatgacaccaaacattgtgtttgttttacctgcattaaatattagtggcggaattatggttgcacttgaacattgtaaaatgctaaaagaagccgggtatgacgttacaattatcaatgatgattttgacagttcaaaatggtgtgaattcaggggtgttaaatttccggtcattcctagccgtgagaatttgattattggaagttttgataaagctgtggcaacaatgtggtctaccgtaaaatttttggaaacttatacaaatattaaaaaaaggtattatttggtgcagaattttgagacaaacttttatgaaccgaatgatccattgagaatagaggccaatcagaagtatagtccaaaagtagaggtacaatttgtgacaatttcaaagtggtgcgaggaatggctgaaagaagattatgagagaacatcaagatatgcaccgaatggaattcataaagagcagttctgttccgagaggagaacatttgaaggaaaaattagggttctgattgagggggactgcggtgtttattacaaaaatgttgatgagagttttaaaattgctaataggttagatcctgaaaagtttgaaatttggtatatgtcatataatgcacagccaaaagagtggtaccgtgtagataaatttttacacaaaattccatttgaaaaagtagcggatgtttacagacaatgtcatattttgctaaaaacgagttttctggaaagtttttcgtatcccccactcgaaatgatggcaacaggggggtattcagtagttgttccaaatggaggaaacaaggaatatctgatcgatgaagaaaattgtcttttatacccttgcggagagattgataaagctgttgaaaaaatcaaaagaatctgcaatgatgaagaactaagagagcgtttatataggggaggtatgaagacggcggagaatagagactgggaaactattcgaacagaaatattggagttgtataaataatagaacaggagggcgcagatgaaagtattagtaacagggacaaaaggacagcttggatatgatgtggtaaatgagctggagaagagaggacatacagcagttgcagttgatattgaagagatggatattacagatgctgtttcagttgagagggttattacggaagcagaggtagaggcagtgatccactgtgcggcttacacagcggttgatgctgcggaagataatgtggaaatctgtcggagagtcaatgcagaaggaaccgagaatattgcaaaggtatgtaaaaaactagatctaaaaatgatctacatcagtaccgattatgtattcgatggagagggtgaaagaccatgggaaccggatgatgagagacatcctctaaatgtatatggacagacgaaatacgaaggagaacttgcggtagaaaagtatctggagaaatattttattgttcgtattgcatgggtattcggtgtgaatggaaagaactttatcaagacaatgctgaagctttcagaaactcatgaagaattgaatgttgtggacgatcaagtaggatccccgacgtatacttatgatcttgcggtattgcttgtggatatggtagagagcgataaatatggaagataccatgcgacaaatgaaggactttgtacctggtatgaatttgcaaaagagattttcagacaggcaggtgtagaggtgaaagtaaatccggttacaagcgatatgttccctgcaaaagcaaagagacctaagaatagcagaatgagcaaggagaagctcgatgcaaatggattccaccgacttccaacatggcaggatgcgttggaaagatatcttagcgagattcgctagaatgaaggaaggtattttcatgaaaagcagatggaaacagatgtgcatttttctcgtattgatcctgagtatgattggatgtggacagaaagaaacggagccgaaggaagaacagactcagacagaagatacaaaagaggaaggaagcacgcaggaaacacaacagaaggaagaatcaactcagtctgcagagccagagcagggaagccagtcacagaaggaaatcaaaatctattttgcaaataaagatgcgtctggttttgaaacggaagaggttgcaatggaagacgtatcagccgaaaagatttgggaacaacttgtggcaaaaggtgttgtaccggcagatacgcaagtaatcagctgtacagaaaagactattgatggggaaaaggcattgcagttggatctgtctgaaaaattttccacttatctgaatgggcagggttcctctggagagtacttgacagtagggtgtatctgtaatacttttttggatgcttttgatggagagtcgatacggataaccgtagacgggaaaaaacttgagacaggtcatgcggaatatccgggatatttgtcaaaatatgaatccgaatagaaggttttagaaaaatatgagtgaaaaagagacaaagacatttaaaattaaatggacaaaagtcttgaagaaagtatccccttataacattaaaaaggggatactttatttaaggcattatggtccgaaagaattttgggtaaaacttacggagcgattccaggcagatgatgtagattatgagcagtggtatgagaatcataaggctttgcccgaagaactggaaaagcaaaaaaacgaaaaatggaaaagaaagccattgatcagcattgtagttcctgtttataatactccgcaggtatttttgcggcaaatgattgaatcagttcaaaaccagtcctactccgaatgggaactttgtattggaaatgcaagcccggaaaataaggaaatgaaaaagattctggaggaatataaaaatgatgctcggatcaaagaagtagaaattccggagaataaaggaatttcgcagaatacaaacagagcgatggagattgcttccggagaatggatcggtcttttggatcacgatgatcttctcgctccgaatgcactgtatgagattgcgaaagcggtaaatgagcatccagatgcagaagtgatctatacggatgaagataaggtgaccactgatttgaaagaacattttcagccgcacttaaagccggatttcaatttagatcttctccgttccaacaactacatctgtcacttcttcgtagccagccgtgatctgatcaagcgtgtaggaggattccgcccggaatttaacggagcgcaggactatgatttgattcttcgctgtacggagcaggcgaagcagattgtgcatattccaaaaattttgtatcactggcgtgtccacaaggcgtcaactgcagataatccggctagcaagatgtatgcgtttgatgcgggaaagcgtgcaattgaggaacatcttgtccgctgtcgtacaaagggaactgtacagcatacgaaagatcttggattttaccgggtaaaatatgaagtctgcggggaaccacttgtatcgatcattattccaaataaggatcagtcggaagcgctgaaaaaatgtctggattcgattcgagaaaagacaagctatcggaattatgagattattattgtagaaaataatagtgaggagccggaaacatttgccttctataaaaagattgcaggggagaagattaagatcgtcacctgggaaggggaatttaattattccgcgatcaacaacttcggtgttcgtcatgcgagaggagattatcttctgcttctcaacaatgatgtggagattattaacggggactggctaacagagatgctttcccactgccagagaaaagaagtgggaattgtcggggcgaagttatattatccggataatacgatccagcatgcaggaatcatcatcgggatcggaggcgttgcaggaagtgtctttgtaggacttccaagagcgttttcaggatatcttcacaaggcatcgatccagcttgatctcagcgcggtcactgcagcatgtatgcttgtaaaacgctctgtatttgagcaggtcggcgggcttgaggaaaagctgaaagtagcgtttaatgatgtggatttctgcctgcgcgtcagagaaaaagggtatcttgttgtctatgatccgtatgcagagctgtatcattacgaatcgaagacaagaggtgctgaggatacgaaagagaagatcagacggtttcagacggaaatcgaatatatgagaagccactggatcgggcttctgaaaaaaggcgatccgtattacaattgtaatctgtcactgacaaagtgggattattcgttgaaaaataatcagaggagctaagagatagatgtacgatgtgtcagtcgttataccaaactacaacggaataaagtatctggagcattgtctggaggctctggaaaagcagagagaggttgcctttgagacgatcattgtagacaactgttcgcaggatggaagcgccagcctggcgaaagagaagtttccacagtgctgctatctgtcgctggatcagaattatggcttctgccgcgcggtcaatgaaggaatcaaaaaggcagcggctccgtttgtagtgcttctcaacaatgatacagaagtggagcctgaatttttgaaaaatctgttggattgtatcagtaaggatgagcggatcttttcggtggaggctcggatgatgcagtatcacagaagagaactgatcgacagtgcggggacatcttattcagcgctcggatgggcatcggcaaacggaaaagataagacaaaagaaaagtttctgacttcccagaaggtgtttgcggcatgcgcgggagcggcaatctaccggaaatcggtctttgaggagattggatattttgatgaggagcattttgcatatctggaagacattgatatcggatatcgtgcaaggattcacggatattacaatgtctatgagccgtcagcagttgtctaccatgtgggaagcgggacgagcggctccaggcataatgaatttaaggtgaaatattcatcgaggaataatgtctatttgatttataaaaatatgccgctccttcagattttattgaatagtccatttttgttgattggtttcctcacaaaaacgatcttttttaccgcaaaaggatttgggaaaacttacgtaaaaggacttgcagaaggagtacgcctttctcgaaataatcgggagaaaaagattgttttccagagaaaaaattttggcagttactggcagattcaaaaggaactgtggaagaatctgcttgtatattttcaataggaatataaaaagtaaaggaatgaaaaggctgttgcagcagaacatttgcaaaaacgatgggcgccggaggcgtttcaggaagaggcaaagaaaagctgcaatagcctttttttgtttcggttaaaaaataaaatgcaaccttttccgcttgcggcacgtctaatagttgaagagaaaaatcatttgcaagaaaaacaacgggaggaggggcaaatgtgatacagcttgtcagaagagcaaagaaaaaagatgatcaggcttttatagaactgattgaccgatgcaaaggggatctttataaagtggcgagaagttatctgaataatgaagaggacattgcggatgcgattcaggagacggtcatagattgttacgagaagattggaagcctcagggaggcaaaatactttaaaacatggctgacaaggatcctgatcaataattgtaatgacatattaagatgtggaaggagggagtgtcctttggaggaagcagcacagatcagaggagagagcagggagttggagagatgtgagtttgaggacgttctggatgcgttggatgagaaatatcggatcattcttgtgctgtattatggtgagggatttaaaatacgggagattgcacagattctggaattggaagtgaataccgtaaagtccaggctttccagaggaagaaagcagtttgaacacatgtattgtatggaaccaagtatgcagagggggtaatgtagatgaagaaagaatttgacgaagaagtaaagaaaaagctgagggaagatgtggatgtgccggaatgtgtagatgagggaatccagagagcatatgatatgatcgggatttccggtgagaaaaaagtaatacggcgaagaaagagaatctggccggcagctgcggcagttgccgcgttgacagcagggatttccattacagcagtagcagtgaattattatctgaaagttcatctgaaagaagagggacaggttctgaaatattatattgaagtggataaagaacagaaagaagcgcaccagattgaagtgaatccgacgtatcttccgaagggatttgaagcagaacaggtagaagagggggcgccaaagaaaacctacgggacagcggagggagatagtatttccattatctcttataatgcggcagaactttatcgaatgtcgcagctcgaggaaaatgtttttgtcgaatatcggaaagacagctataccgcagtcgagggagaacagaagttagatctgtttacgagaaaaaatgaaaaagtagacagcgacagggagattacagatgtatatctgtttagtgaagaagagggatatggagtctggatttggagtgagagcagtctagagcaggaagaactggtgaaaattgcaaacgggctggagattactgtcttagaggaaactgttccatatccgtctgaggcggaaattgcagaagaacgggaaaaagacaaaaatgcagccaaaaaagccgaagcagagcaggagtatcggagcagcaatggggtttcagaagaattggtttatcaggttggcgaagaagtaaaagacacaacgagagatgtgatggcagagtcagatccggattatctgagtgaggtggaggatatcagatttactgttcttagtgcagaagtgtcagatacacttccggcagatacattttcgcagcaatattttacaacagatatggaaagctggatgaacgaagatacgtcgctaaaagcacatcagagatatcggcttggagaagaggaaggacagacgactcttgatgcgctggcagacaaagaggcagagacggtgaatgcaaagtatgtcatcgtgaagatgaaagcgaaaaacgcgtctgcatttcagacagactggaataaggaagaaggtgtgtcgatcgctccgacgcttactgcgatgcatacaggagaagagggaaagcttgtgtatccgcaggaaacattctggtcggcaaatgaaggatatgatctccaatggggagcagaaagaggaggatcattcccaatttattttgacaagccatattttacagagggaatcaagggagtaaaatcaaggctgttttgtccgcttgctccgggggaggaaatggaatatacattagtctatgtggtagacgaagatcagctttcaaatatgtatctgcatttttatccgcaaaatgagatggagatgaatggagagtatctgacaactccgtatgtggatatcagccagtaaagaaagcagacagaaatctgaatgaaagattcagatgataaaaaagaacttgtgtggatgggagaaaagaaagaaaaatctccatcgcataagttcttttttgttacaaaaatattacaaagactacactttttcttgtgatttttaaaactttattgtattatatataggataatggaaaaaaatagatatagaatcaaatgaaataaacaatagatgagaaacgggtgaatgaattttgatcaaagataatcagaaacattttaaccggatgcatgttgtgctggatgcatgtgtgattattttttcttatgttctggcatggtatcttcggtttaagagcggactgtttcagcaggatccgtggtttttatctcttcatgaatatatgggagcacttctctacattgttccgggctacttaatgttgtattatttattccagctttatacgccgaagcgggtacgtggacggagactggaagcatggaatattctgcaggcaaacacgattgggctgatggtgttcacattcgtgttgtatattatagagcaagcaaacttttccagaaaaatgatcgcgatttttttctgcgtgaatattgtgacagagatttttatgagaaatcttgtgcggcattttctgcgggatatgcggaagcgcggttataatcagaaacatatgattttgattggatacagccgggcagcggagcaatacattgaccggatcaaggcaaatccagagtggggatacaccatccggggaattctggatgacaatcagccgagaggaatggaatataagggtgtcaaggtgattggtacgattgaaaatctaaagatcatcctgccgcagaatcgtttggatgagattgcgatcacacttggaattaatgagtattccaagttggaatccattgttgcaatgtgtgaaaaatcaggagtgcatacgaagtttattccggattataatcacatcattccgaccaaaccgtacacggaggatcttttgggacttccggtcatcaatatccgccatgtaccactcagcaacacattgaaccgatggatgaagcgattgatggatattttcggagccatcgtcgcaattattttattctctccggtgatgctgcttgcagcaatccttgtcaagacgacatcagaaggaccgctgattttcaagcaggagcgtgtgggacttcacaacagaccattttatatgtataaattccgatcaatggttgtgcaggataaagcagcagagaaaggaaagtggaccgtccagaatgatccgcgcgtgacaccgatcggcaaatttatgagaaagacaagcatcgacgaacttccgcagttgttcaatgtcctgaaaggtgagatgagccttgtgggaccaagaccggaacgaccgttttttgtagagaaatttaaagaagagattccgcgctacatggtcaaacatcaagtacgcccggggattactgggtgggcacagatcaatggctaccggggggacacttctattatgaagcgaatcgaatatgacttgtattatattgaaaactggactatcgggttggatattaaaatattgattttgacgttctttaaaggctttatcaataaaaatgcatattagtaaggagattatagatgggaacaaagagaccgtccgggagacgatatccggaagatgaaagagagatgagagcagcaagatccgcctcggagcggagacgacgtgcgctggaggagaagagacgggcgaagaagaaaaagaggagaagaagaatcggtattttagtggctgaagtgattatcctcagtgtattgtgtgtttttgcatatgcgacagtaaagatggacaagcttgatttcaattttctggatgaagataagctggaagtatataaggataccggaccgtatacaaatatagcgctgtttggtcttgatgccagggaaggtgagagcattgagagcggtgtgcgaagcgacagtatgatgatcgccagcatcaataatgagacgaatgaggtaaaagtcgtttctattttccgagatacactgttaaaacagcaggacggtacgtttgacaaggcgaatgcggcatattcgtatggagggccgcaggaggcgattgcacttctgaaccgaaatctggatctggatattaaaaactacatgagtgtggactttaaggcgctctcggatgtgatcgatgcactcggtggaatggaattggaactgactgcagaggaagtcgtacatatgaataattactgtgtggaaacttcagaagtgactggcaaagattacgagagaatcgagccggaagtggcaggaacttaccatttaaatggtgtgcaggcgacatcctacgccagaatccgtgccacagcgggaggagattacaagagagcggagcgccagcggcttgtgatcgagaagattgtagagaaagcacagaaggcaaatttaaaaacattggataagattatagacgtcgtatttccgcaagtatccacgagcttttcttctaaagatctgattgggattgcagcgaatgcactctcttatcagttgggagagacacagggattcccatatagtattgcagatacagatgtagtggatggatatgaaggctcttatgtagttccttcagattttgacggggatgtcaaaaagctgcatgaatttttgttcaatgagaaagactatcaggtatcggatacggtcaaggaaatcagccatgagattgacgtgatgtcaggagcaattgtagaagatggatataccgatgagtatggaaccgatgaaggatattcggaagaaccatacggtggttatgagtctgacggttacgagaccgatgtttatgaaagtgaaaattacgaaggctcttactaagaagagaaaaagagcaggaagacaggggacacaagtgtaataatgttagaagaaagaagaaaaagagctgatgtcattattccggtctataggccggatgaaaaattaaaaaaactgttggaagggttaagaaaacagacgcatttggcagagcatatttttctgatccatacaaagacagagggagtctcgttagagtggtgtaaagaatacgaaacagtacaggttatagaaatcaggccagaagagtttgatcatggaggaacaagacggatgggcgcagaactgtctgacgaggaattcctgatttttatgacacaggatgcagtgccgcaggatcagtacttgatcgaaaaactgatggaacctttccaagaccaaaaagtcggagcaagttatgcaaggcaattgccggataaagactgccggatggtggaatgctatacgcgaagctttaattatccacaggaaagcagaataaaaacgattgaggatgtggataaacttggaattaagacgttcttctgttcaaatgtatgtgccgcttataaaaagtcagtttataaagaaatggggggatttgtaccgcgggcgatctttaatgaagatatgattctggcagggacaatgataaaggcaggatatggcatcgcatatgcggcggatgcaaaagtaatccactctcacaattacagtgggagacagcagtttcacagaaattttgatcttgcagtttcgcagaaagatcatccggagatttttgctgggatctcatccgagagcgagggaatccgccttgtgatttcaacagtcaaatatttgctgaaaaataagaaagggatggaaattcccggtctgattgtacagagtgggtgcaagtttctgggatataaactggggctgcattatgagaagctgccggaatggcttgttttgcgctgcacgatgaataaaacttactggaaatcacaaaaaaacgcataaagtcattgtagttcgctgataagtgcgatatgataaaagatagcttacggataaaaacatagaagaacagttgtaggaaaagaagaaaggatacaattatgacacagagacagtcaagaagaagacgtgcaaggagaagacggaagcatggattttccacatggtcactggggaagaagattttattagtttttgtcattgcattgcttttgatgatcacggtaggtgttgtctatgcggcagataagcttggcaaacttgagcagacgaagctggacacaaagaaattgagtatttcagatgaaattgatcttggagatggatatacgaatctcgcattgtttggactggattccagagatggggagttaggcgaaggtgtcagaagtgacagtattatcatcgcaagtctgaacaataaaacaaaagagattaagatggtttctttatatcgtgacacgctgttagaactggaagacggaagtctgaacaaagcaaactcggcatatgcattcggaggtccggaagaagcggtcgcgatgatcaataaaaatctggatctgaatattgaggattatattgcagtgaatttcaacgcacttgtcgatgtcatcgatgcacttggcggcatggatgtaacattgtctgatgcggaagtagtgcatatgaataattattgtgtggagacttcggaagtgacaggaaagtcttatacaaagattgaaccagaagttgcaggaacgtatcacctgaatggagtgcaggcgacatcgtacgcacgtatccgctacacagccggaggagattttgaaagaacagagcgtcagcggtttgttctggaacaaatagcggagagtgcaaaaaaggtaagtttttcttcgttgaactccatcatggataaagtattccctcaggtggcaacaagtatggaacttggggaaatgttaaagtatgccaaaataggaaccagtcttaagatcggcgctacgaaaggattcccggaagccaatacgagtgatacactaagtggtgtcggaagtgtagtaattccagacagtctgatccagagtgtcagagaactgcatgaatttttatttccggatctggagtatgaagtgtcttccactgtgactgcgatagatgaaaaaataagaaataaatctttggaccgttcggatggatctgattttgtggaagatgaagtaaacttctattcggaacctcaatattatgagtatggaagtccggaacaggatgtatggactggcggagagactcagacaccagattatggaacaggagattcttcgggaagtatcgagggatcaggaactggagaatcaggtttgccgggaggtgacggaaccatttcaccggacggaggtggaagtgatctcggcggtggagatgtaggagacagtatgggaggcggagagactggcggtgttgataccggaaccggtcaagagatgacgcaataacaagaaacatacgataaagaggataagaggatgaagatagcaaagaaaacagcagcatttttattggtattatttctgggaatccaatgtatgccgttgactgcactggcggcggacggaacattgtcattctcagatcctactgcaaaagcaggagaaacgatagaagtaactgtaaagatcaacacagcagagggaccgatcggggacggtcaggtacaggttacctatgatccgacctatctggaatttgtcagtggagtcaatgcgactggagaagcaggaacgattacgctttctgcatctggaaatggaacagattctgaactcgcatacagcatgaccttcaaggctttggcagagggagagacaactttgcaggcagtgggatatacagcgtatacgtttggcggtgaagaattgaatctgacacttgggacatctgcggttaagattgaagcgggagatggcacacagacggtcgctgcacagcagccaggcacacagactatgattgagctggatggaaagcagtattttattgcagatgatattccagaagcgctgatcccggaaggatatgagaagagccagctcacatatgagggaagcccgcatacaatccttgtgcataccggaagcggtcagaagatgatttatttgatggatacgcagggggaggggaacctgtttttatatgatagtgagacagatcatttctctgcgtttgaaaagatagacttatcaagtgattcgtatattctgatcacagacgacaaagaaagtgcaaatattccggaagattatgaggaaacaacaattcagatcaatgggaaagtatttcctgcatggcagaatgtagttgacacaaaattggctgatttctgtctggtatatgcagtggataatgctggtaaaaaagggttataccagtacgacagcacacagaagacctaccagagatttcttcctccaacggcagaaaaagagaaacaagatggttctgttgcaaataaggtgacaacatttgtagaggagaatcttccgaaaatcatggtaggggcttggggagttttcctgatgatgttgctgctcattgtgatccttgctgtaaaacttcgccatagaaatgaagaactggatgattattacgatcaggaatatgacgaaaatccgcgtgcagggagagggttctcgtcagaggattatgatgagtccgacgacgatgactatgattacgaagaggattatgacgagtctgacgatgatgactatgattacgaagaggattatgacgagtctgacgacgatgactatgattacgaagaggattatgatgagtccgaggaagatgactatgcttatgaggatgcttatgacgagtccgaggacgattatgaagatgactatgattacgaagaagactatgagtcggaagatgcttatgatgatttgttagactattatgatgatgacgatgattatgagttggagcgggagattctggacgaggatgaaggatttttcgataagagaagcggtaaaaaaagaggaatcgatttaatctaaccagtagtgtagaaagaaaagtttcaatgaaaggggagtacgaatcatgaagatgaagaaagtaaaagcagttttagcagcatttgcgctgattgctatgatgccgtttcaggtaatggcagcagatggaagtattatgttttctgatctgacagaagaaacgggaagaagcgtaaagacaggtgagacggctgaaattaaatttgcggtagcctctacagcaggtgcgattggagaggccaatgtcactttgacttatgatgccagcgcgctgcagtttgagggcgcagaaggtgtcacagagggaagtgaaaaaggatcgctggtctatacgggaaaaggggatggaacagcagcagaattaagaacaactctgaaatttaaagtattaaaagcaggagatttgtcgatccatgtcgcatcttaccaggtgacctccagtgtgggagcacagctgactgaagtggaaacaggaagttctgcaatcacagcacttccaggggagacagaggtggcagagcaaactggcagcgaacagcaaggacagacgacaggagaagcaattgagatttcagatacatacaagatcacgcttctcacagaaaagccggatacagaactgccggagaattatgtagatacagaattgacattgaatggaaaatcttatccggtatggcaggatgagaataaatcttcttactatatcgtctatgcagaaaacagtgatggcgaaaaacagttatatcagtatgattcaaaagaaggaacttaccaacgttttattgcgccggagacagaaaaagacagcgcatcgggaatcaaagggaagatcaaaggtgtgttggaaggacatctgatgcaggcagttatcggagtggctgcggttgtcgcattccttcttctgatggtgttgattcttgcaattaaattgcacagacgcaaccgagaactggatgagatggagctgttcggtatgcaggaagacgatgattttgaaaatgacctttcagactatgcaacagatgctgatgaggttgagtttgatgacgattatgatgaatatgaagaggatgattacgaagaggattacgatgacgaagacgactttgatgatgaggacgacttcgaggatgactttgatgatgaggaagatcgctctaagacattttccatggacttcattgatcttgattaagaatacattctagtatgagaatctaatactgtgcaatcatgacaggataaaagctgttgtgggacaaaaaattatgaaaatatgtgcatagataaaatctgtgaaacagttttctagtgtaattttgttctgcgacagcttttctatttgagaaaatgctttacaaaattcgatattcttgctacaatacaacacgaaaatgcaaaaaaaacggatgtttgtgcaaaaggaggacttataccatgtgtgggattgtaggatatataggaaatgaacaggcggcaccgatactgttagatggattatccaagttggaataccgaggatatgattctgcggggatggctgtctataacggagcggagatcgcagttgcaaagtctagaggaagattacatgtgttgagtgagttgacacaagaggggaaaagtcttccggggacaagtgggattgggcatacgagatgggcgacacatggttcaccatcggatcagaatgcacatccacatgtcaacaaggaagaaagtattgtggtagtacataatggaattattgagaattatttgaaactcaagaagaaattagagaaaaaaggatatgagttccaatcggagacagacacggaagtgatcgcgcatcttttggatgattattacaaaggcaatccgttggaggccattacaaagatcatgcatcgaatggaaggctcttatgcacttggaattttgttcaaagatcatccgggagaactttacgcagtgagaaaagacagcccgctgatcgtagggcgtacagacggtggaaatatcattgcatctgatgttcctgctgtcttgaaatatacaagagatgtggtgtttattgaaaatgaggagattgtaaagatgacaaaagaagaactgtcatttttcacagtggatgaagaaccaatcgagaaaacaacaacaagaattgagtgggatgtagatgcggcagaaaagggcggatatgagcattttatgctgaaagaaatgtatgaacagccaaaagcaattacagatactgttgcaccgaggatcaaagaagaacagattgtgattgaagaattaggtatgagtgatgaggaaatcaaaagcattcaaaaaattatgatcgttgcctgtggatcggcatatcacgcaggtgttacgagcaagtacatttttgaagggctggcaagaattccggtcgaggtagatgttgcatcggaatttcgatatcgggatccaatccttggagacggtacacttgtactgatcatcagtcagtcaggagaaacggcggattcattagcagcattgcgcgaagcaaagagaaaaggaagtaaggtacttgggattgtcaatgttgtgggaagttcgattgcaagggaagcggacaatgtgatgtatacatgggcaggaccggagattgcagtcgctactacgaaggcatattcctctcagcttgcagcactgtatctccttgcaatgaaatttgcgggcgtgagggggaaaataacaccagaattgcaaagagaaatgttgtcagatttaagaaaacttccaaaacaggtagaagtactcttaaagcaacaggagaaagttcagaaatttgcaaacagatatctggctgcaaaggacatattttttatcgggcgtggaattgactatgcgatttcgatggagggatctttaaagttaaaagagatttcctatatccattcagaagcctatgcggcaggagaattgaaacatggaacgatttctctgatcgaggaaggaacacttgtggcagcggtattgacacaggaaaatctgtacaagaaaatgatcagcaatatggttgaggtaagaacgagaggtgcttttgttcttgcaattacaaatgaaggcaatacggaagtagagagagccgctgattacgttctctatatcccgaaaacaaataaatactttacaaattcacttgcgatcattccgctgcagttatttggatattatgtgtcagtcggaagaggatgcgatgtggataagccgagaaatctcgcaaaatcggtgacagtagaataaacaagatctaaaaacacttttttttaacgaagagaacacaattccatcacaaatatcgcttatactgataatcacaaaagcgaaagaatatgtgaaaaggaagggagacttgtttatggataatcaatataattataatacaccaaatgatcagtttcaaaatcaggcaacggggaatggaggaccggattttcatttcggacagacagacccagatttttctcacagaaaaaaagaaaagaaaccgcgagatcataaaaaagtagcgaaaattgcaggagggctctgttttgcagttgcatttggcgtgattgcaagtgcggcgtttcagacaaccaatttcgtaggaaatgctcttttcggagaaaaagtaaagacagaaaaatcttctgagaagaaggtcgacagtacatctttgacaagaacatcaagcacagtgacatctgacgtgtcagaagtagtaaacagtgtgatgccgtcggttgtatctatcacaaatatgagtgtacagcaagtacaaagtttctttggaggaacaagcagtcaggaagtacaaagcagcggttcaggaatcattgtcggacaaaatgacacagaacttttaatcgcgacaaacaatcatgttgtggaaggaagtacaacattgactgtcagcttcatcaatgagtcaagtgcagaagcaaagattaaaggaacagatgcatcaagagaccttgcagtcattgcggttccactggagaacatcgaagaagagacgatgggagaaatcaaagtagcaaccttgggagattccacaaagcttcaagtaggggagccggtaattgcaattggaaatgcacttggttatggacagtcagtgacaacaggaattgtcagtgcattgaacagacagattgatatggaaggatttgatgcagaattgattcagacagatgctgcaatcaatccgggaaacagtggtggagcccttgtcaatgcgaatggagaggtgatcggaatcaatacagtgaaagtaagcagcgatgcggtagaaggaatgggatatgcaattccaatttctgatgcaaatgagacgatcacaactttgatgaacaaagaaacaagggagcaggtaccggaagatgagagaggatttttaggagttgaaatcacaaacgtggaggcagaaagtgccgaattatacggtatgccgaccggtgtttatatcagaaatgtcatcgaaggaaccggggcggagaaagcaggacttgtgcgtggcggagtcattacagagcttgacggaagcagtgtagacagtatgacaacactccagaatttactttcttactaccgtgtgggagaaactgtgacactgacggtagagatgccgggaaaagacggttcatatgaagaaaaagaagtggaagttgtcttgagtgaaaaacagactgaaacagcaattccaaagagataagaaaagaaaataataaaaaagagcatccttcagaaaacgaaaacatttccatgaatggttttcttagaaggatgctctttctcttttagaatgttattcagtgtcgcacttgaagcaagatttcatatcaaattcaggattgaacgcatagaagtttttgctgtccaaatgatcttgaacgattcggagactttcaccgaaacgctgataatgaacaatctcacgttcccgtagaaaacggattggttcgcagatttcaggatctttcaccaaccggagaatattgtcgtaagtggttcgagctttctgctctgcggccatatcttcatggaggtcagtgattggatcccctttggattggaaataagttgcagtccaaggtgttcctccggcagactgaggccagagtgcgagagtatggtcgacataatatttgtcaaagccagattctttgatctgttccggagtcagatctttcgtcagttggtatatgattgcgcagatcatttccatatgagcaagttcctcggtaccgatatctgtcaatgttccgattacttcccggtatggcattgtatatcgctgggaaagataacgcatagatgcggcgagttcgccgtcgggaccgccaaattgactgatgatgacttgtgcgatctttggattggtttgcgtgattttgacgggatactgtaatcttttttcataattccacatgaactaacatcctccttcctgccacggccatggttcattgatccagttccacctgtctgtgcaggaggtcatagtcgtatcaatcgtcagcggtccgtaatattttgcatattctttgagcgcctgattccgaagcttactgtattcgtggaagtaggccagcgcattggcatcgcaaggatgagtgtcaagaaaaagtttgacatcatctacggcaaaactgacacggttgatcaggcagagaagatctttgcggcaaggtgcgttgtttgtcatcgattacaacctcccatcccatgaaatggtttgtcgagttcttcaaagatggttccccggcaaaatcctttttcggcctcgtaaatgcgctgccagatctgccatggaacataagccattgcaagtggcatgccgtccagactgtcttctctgtcgcagcatggagttgcctgcgggcgggaaacatattgtgtggaagaatatcttccatagtcggttgtctgcctgcagccacagttattctgatgataattttgcatatggaaagctcctttcttcttctatctgatattattgtatgttttagcagagaaaccgtgcgttcacaggaagaaaaccggaggaatggcagaaacagaataaaaaaattgcaatcagtgaagaggaagggtataataaaaaagtatgatttggaaacagaacaaaaggagagtataactatgtgtggatttacaggattcgtcggaaatattgacaacaaagagcaagtgcttgaaaatatgatgaatacgatcgtgcaccgtggaccggacagtgccggacagtttctggatgaagatgcggcacttggatttagaagattaagtatcattgatatttccgcagttggagaccagccattgtataatgaggaccggacaaaagtacttgtattcaatggggaaatctataactatcaggaacttcgcgaagaactgatcgctgcaggacatacttttacgacacatacagattcggagaccttgctgcacggatatgaagagtggggagaacaacttgtagaccgtctccggggcatgtacggatttgtgatctgggacagggtagagaagaagctctttggcgcgcgtgatattttcggaatcaagccgttttattatgcacagatgaacggcacatttttatttggatcagagatcaaatcatttgtggagcatccgaagtttgataaggtatttaatgaagatgcgcttgcagactatttgtcctttcagtttgtgccgacaaacgagacattttttaaaggggtattttgtctccagccgggacactatttcacatatcagaatggaacgctttccatcagccgttattatgaaccggatttccatggaaagacggacaagccgtttgaggagatcgttgatgatgtggaacgtgtgatgagagaatctgtcaaaatgcataagatcagtgatgtggaggtaggttcttatctttccagtggtgtagattcgagctatatggcctatttaggagaagtagaccggacgtttacagttggttttggacaggaacaatacagcgagatcaaagatgcgaaggagtttgccgacagcatcggtgtaaagaatgacagtaagattattgagccggaagaatactgggacagtctttcagatatacagtactatatggatgagccagtggcagatccggcggcaatcgcactgtattttctgagtaaagaagcggccaagaaagtaaaagtagtactttcaggagaaggatcggacgagctgttcggaggatatcagatttattgtgagccgatcgagtatactggatttaataaaatcccgcgtccgatcaggaaagcgctcggagtatttgcagaaaattgccttccgcgaggaatgaaaggtcggagttttctgattcggcattcgaagacgctggaagagcgatatattgggaatgcatatatttttacagagaaggaagcaggaagactgttgaaaaatagcagaagaccagatacaatgaaagtgacagcgccgatctatgagcgagtaaaagacaaagatccggtgacaaaaatgcagtatctggatatgcatttatggcttgttcatgacattttaatgaagggcgataagatgggaatggcaaattcactggaagtaagggtacctttccttgataaagaagtgatggaggttgcgcagagccttcctctgaaatataagattgacgcacctcgcacgaagattgcactccgtgcggcagcagatcgtgagatcagaagttatacagcagagaagaagaagcttggattcccgattccaatccgtgtctggctcaaagaagaccaatattataaccgtgtcagagcgatgtttgagacgaaggaagcggagcagttctttgatactgcttatctgaaaaaacttttggaagagcatcgtgccggtaaatttgacaacagcagaaagatatggacggtctatattttcctgctttggtatgaacgcttttttgcaaatgggaaaccagtgcatccggcgatgagcaacaagtagaaaaagtacagaacaggagaagtagatggcaacacgtaggaaagtcctgcgggaagggacgagaaagaaaattgaatattttgactataacctgcttgcggttttgatttttattatctgtttcggtttgattatgctgtacagtgccagtgcctacaattctcaggcggcgaacaatggtgatggaatgtatttgttcagaagacaggcaatggtcacggcaggaagttttgttgtgatgcttgttatttccaagattgattaccatctctatgccccgtttgcaaaaatcatttattatatttcgatttttctgatggtacttgtgcgctggtcgccgcttggacttgaggcaaatggatcaaagagatggcttggtattaaagataccccgtttcagatgcagccatccgaagtggcgaagattgcagtgatcatattcattccgtatattatctgtcagcttgggaaatatcttaagacaagtgccgggatgacgcgagtgcttgtctatggaggatttgcttcgttcagcgtatttttctttaccgataacttaagtacggcaattatcgtggcagggatcgtgtgtggtatgatttttgtggcgcacccgaagacaaagccttttatcaagattgcagttggcggaatggtggctgttggaatttttctggtgattattttagtgcagctttcttccagtgataatttccgtatccagcgtgtcgttacatggcttcagccggacaagcatatggcagaaggcggatatcaggtaatgcagggattgtatgcgattggttccggaggattctggggcaaaggacttgggaacagtgttcagaagctttcggcaattccggaggtacaaaatgatatgattcttgcggcaatctgcgaggaacttggaatctttggcgcaatcgttattttaatcctttttggcatgcttttatatcgcctgatgttcattgcacaaaatgccccggatttatacggctctttgatcgtaactggaatttttacgcatattgcgcttcaggtcattttgaatattgcggttgtaacaaacttgattccgactactggaatcacacttccgttttttagctacggaggtacgtcgattttgttcttgatgtcagagatggggctggcattaggggtatcgcgcacgataaagtttgaagaaacttaagaaaaaacttttcatatagcaggcagtgtggtattataatgtagtattgaaaactacatgaaaacatgattgagtatcatgagagctggtatctgggagggatgaagaatgaattacaagattgtcgtggacagttgcggagaattgacagaagagatgaaacaaagcggatattttgaatctgttgcgatgagtatagaattagaaggaagtacgattgtagatgatgagacctttgatcaggcagactttttaaaacggattgcagctagtggagaatgtccgaagtcgtcttgcccatctccggaacgttatatggaaagctatgctggagaagcggaacgtgtatacgttgtaacattgacagcagaacttagtggttcgtataacagtgcagtgcttgggaaaaatctgtacgaggaggaatatgggaagaagcagatccatatttttaactccaaatctgcttctgtcggggaaactttgatcgcgctgaaaattcaggaatgcgaagaagctggcatgacatttgaggaggtcattcagacagtagaagaatatatagaaagtcagaaattatattttgtcctggaaacattggaaactttaaagaaaaatggaagattaaagggagtcaaagcattggttgccagtgcattgaatataaagcctgtaatgggagctactccggaaggaacaatttaccagatcggtcaggcacgtggaattaagaaaacattggcgaagatgacagaaatggctatagaaggaattcaatgcggggagaataagattcttgggattgcacattgcaactgcagggagagagcagaggcggtggcggagatgatcaaagaaaagaaaaaagtgaaagatgtgatcatctcaaatacagcaggaatcagcagtatgtatgcaaatgatggaggaatcattgttgtaatataagagaagatgttgcaaaggagctgtgaaagaaatgagtcaggagaaagtaaacagatataaggaagaaaaagccaacagaaagaagatgctgcgccgccaaaaagttatgaatacagttcgaaagactgtagtatctgttgtgtgtgtggcggttctgggatggatcggttattcggtatacagtacttatacagagagccagccaagagaatcctatgaagtggattacagtgcggtaacagaatatttgcaaggtgcataatcgtgaagggagtcggagaagagagtaagatcttttctggctctctttttaaactgaaaactagaaaactgaaaaaaagtcttgaaatcaagtaagaagtggggtacaatgaatctaagtggtagaaagtggtgaaaagtggtacgaaatggaaaggaagtggcagaccatttcgagagaaggtgaccttcatgttgactggagaatataatcatagtattgattcaaaaggcagattaattatccctgccaagtttcgagagatacttggtgacagttttgtaattacaaaagggttagataactgcttatttgtgtatccggacaatgagtggaaactttttgaagaaaagctcagaaccttaccgcttacaaacaagaacgcaagaacttttacgcgctttttccttgggagtgcagtggaaggcgtacttgacaaacaaggaagagttttaatctcttcagccctgagagattttgccggtcttgaaaaggaagtcgttctggtaggggtgctggatcgagttgagatttgggataaggcaaaatgggatgaaagtaatgctgaagtagaagcaaatatggatgatattgccggtcacatggaagaattagggcttggcatctaattcatgacaatagaaagagagcaagtgatgctttctatcgttagaaatggaggacaatatggaattcaagcataagtcagtattactggaagagacggtaaatggtctgaacatcaagccagacggcatttacgtagatggaacgcttggtggtggcgggcatgccgaagaggtatgtaagcaattaaatgacaaggggagttttataggaatagatcaggacgcagcggcgattgaagcagcgagtgtccggttggccggcttcggggagagagtcacgataatcagaagtaattattgtgatatgaagtcgagacttcgggaaagaggaattgacaaagtcgatgggataatccttgatttgggcgtatcatcttatcagttagatacggcagaaagaggattttcttatcgtgttgatgccccgttagatatgaggatggacaggcgtcaggaaaagacggcgcgtgatatcgttaatacatacagcgagatggagctatttcgaattatccgtgactatggagaggacaagttcgcaaagaatattgcaaagcatattgtcatggaaagagagaaggcgccgatcgagactacggggcagttatgcgagattatccgacatgcaattccgatgaaatttcagaagaacacgggacatccggcaaagagaacatttcaggcgattcgtattgaactgaatcgagaactggaagtactcagagatacattagatgagatgattgagttactcaatgataatggaaggatctgtatcattacatttcactcattggaagaccggatcgtgaagggaatatttaagaagaatgagaatccttgtacttgtccaagccattttcctgtatgcgtttgtggaaatgtatcgaaggggaaagtgatcacgaaaaaaccgatcttgcctggcgaacaggaattagaagagaacagtcggtcaaagagcgcgaagctcaggatttttgagcgacatgtgaatacgaaagtataaaaagaaagaggagagattgtaatggcgataagagaagaagcttacgtatatggaaacactgtacgacagccgagagtcagtatagatagacagacagcattacagccttcagaaccaaaaagggtgagtaaacaagtacataaaaatagaaaaagagcattggatatgaataagggatatgtgttgtttttatctatagctgccattgcagcactctttatttgtgtaagatatcttcagattcagtctgagattacgaaccgttccgaagcgatcgctgcacttcaaagtgaactgacagagctgaaagaggagaatacagcaatgtacaatgctgcgacagacagcgtggacttagaagagcttcgcaaacgtgctgtggaagatttgggaatggtgccggctacgccggatcaggtcatggaatatgacagcccgacgagcagttatgtgaaacaatacgaagagataccggaaaatggaatattagcacagtcaagtaaagtttctaagtaaaaggtgagaaaatgtccaaaagaaaaaagcgaaactcatttcattttttaaaaagaaaattttcgaagattatgcagaaaaagctagtactattattttcattagttgtgctggcttttgctattttaattggaagaattatacagatcaatgccatgaatggcgaaaaatatacgaaggtcgttttagatcagcagcagtatgacagcagggtgattccttttcgaagaggagatattgtggatcgcaatggaacaaagcttgcaaccagtgagcgcgtgtacaatgttattctggatgtcaaggcaatgcttgagaaagacgaatatcaggagcctacgatcaaagttttaaaagactgctttggaatcgcagaggaggatgtggaggaactggtcgaatcgagtccagaaagccgttataatatacttctgaaaggtgtagattataatactgcgaaggaatttgaggcgatcgatgaagacgaagaaaagcatccgaatgttaaggggatctggctggaagaggattatgtgcgaaaatatccgtacaattcactggcaagtgatgtaatcggattttccaatgcagacgatgtgggaacaatcggtcttgaggcatcttacaatgcgattttaaatggagtagatggaagagagtacgggtatctggaagaaggagcgcttctggaacgtacaatcaaggaagcggagaatggaaacacgatcgtatctaccattgacgcagaactccagaagattgtggaaaaacatattttagaatttaatgaagcttataaggataatgcagagaaaggaaacggaagcttgaatacagcggtgatcattgcagatccgcagagtggggagatccttgcacaggcatcttacccgaactttgatctgaacaaaccgcgtgatatttctgcctactacacagagaaagaactgaagaagatgaaagaggaagaaaaagtggagatcctcaataatctttggagggatttctgtgtcagcgattcgtatgaaccgggatcaacagcaaaaccgtttactgttgcagcgggactggaaacaggaaagataaggggaaatgaagtatatacttgcggaggatctctcgttgttgcggaggatacagagccgatcaactgtcactacacagcggggcacggtacgcagaccattgcgcagtcgattgcaaattcttgtaacgttgcaatgatggaaatgatcaaagtgattggagctgaagatttttatcgttatcagagtatctttggatttggcgctcagacagggattgacctgccgggagaggcagaggggatcctgcaggatccagagctggtaggtccggtagatctggcaactaattccttcgggcagaatttcaatgtgacgatggaacagatggttgcgggaatgtcagccttgatcaatggaggcaactattatgagccgcatgttgtcaaacagattcaagatgaaaacggaaatgtgattgagacgaaagaatctgttttgaagaaacgtgtgatttctgagcagacgtcgacaatgctgaaacagtatatgaaaacggttatggaaggaactggaacaggagcctcagcagcggtggaaggatatgacatcggaggaaagactggtactgctgagaaataccctagaaacagtggaaagcatttactttctttcattggatatgcaccgcaggatgagccggaagtactgatttatgttgtgattgatgagccgaatacagagtcccaggaagacagttctctcgtgttgaatctggcgcgcagtattatggaagaggcatttccatatatgaatatttctacgattgacgggcagccggttgtagctccggagcagccggaggaagatcagcaagaggtagaaccacaggcggagaatgagacggaaaccgaaagtcaagaagaggtttcgggagaaccttcctatgaaggggaagctgtcggggatgtttcttacgaaggggaaagttatgacgatggtgcttacggagatggaacttacgaggacggctctggggatatggagtctggatattgattgaacgattttatgaaaattttgtccaaggaaatgtgaataacctcacagaagtgttaataaattataaaaacaacttctgtgaggttttttatgaaaaataagacctataataagaaaaaagtgcttgtggtctttctcgcagcggtcacagtgatcttaggattgatcggacggctgtgttatctgatgatttttgatgcagaatattaccagaaaaaagcggaggcgctccatgaacgggaacgtgaaattaaagccgcaagaggagaaattgtagaccggaatggaacagtgcttgcgacgaatcgtacagtctgcacgatttctgtgattcacagccagatcaagaatcaggagcgtgtcattgaagtgctggcagaggagctggagttggaacccaaggtggtgagaaaacgagtagaaaaagtttcgtctatggagaggatcaaaacgaatgtaccgaaggaaatcggggataagattcgtgaatatgatcttgcgggggtaaaagtagatgaagatttcaagcgctattatccatatgaaacgctggcatcaaaagtgctcggatttaccggaggggataatcagggaattatcgggttggaagtgaagtatgagaagtatctgaaaggacagaacggaatgatcctcacgacaacagatgcccgtgggattgaactggatgggattgcagaagaccgcatcgaaccggtaccggggaatacattgcagctcagcatagactataacattcagaaatatgctgagcaggcggcacagaaagtgatggaggaaaagcaggcagatggggtgtctatcctgctgatgaatcctcaaaatggagaaatactggcgatggtgaatgtgccagaatttaatctgaatgatccttttacactgacggaggaatttctggcagcaaatgctgaaaaacagcctgcagcagatacgaaagatccggagaagaagcaggaactcctgaatcagatgtggagaaatcgctgtattaacgatacttatgagccagggtcgacttttaagattattacgtcctctgcctgtctggaagcaggcgtagtgaaactggatgacacttttcaatgtccgggatatcggatggtggaggatcggaagatccgatgtcacaaagtaggaggacatggaacggaaacatttgtgcaaggagttcaaaattcctgtaacccggtatttatcgacatcggtctgcgactcggtgtggataagttctgcgagtattttaaacagtttcgattgctggatctgacaggggtagatcttccaggagaagcaggaacaatcatgcataagaaggaaaacatcggtgcggtagagctggcaacgatgagttttgggcaatccttccagattacgccggtgcagatggcgacaacggtaagttctctgatcaacggaggggttcgtgtgacaccacattttggcatgggaattgtggatcgggaaggagaaaagctggagcctttttcttatccggaaagaaaaggagtggtatcgaaagaaacgtcggcgacaatgcgaacgatccttgagagcgttgtagcagaaggatctgggaaaaatgcatatattgaaggatatcggatcggaggaaagacagcaacctcgcagacacttccgagaagcgccaataaatatatttcttcttttatcggatttgctccggcagacgatccacaaatactaggaatggcggtgatccatgatccgcagggaatttattatgggggaacgattgcagctccggtaatccgtgatattttcgacaatattcttccatatatggggatagaaagagggccggttagcgaaacaaaagaggaggagtagttgaaaatgagagggaaatgaagtatactatataagttgaattaaaatgagaacaaaagagtgaaagggtgtatctatggattataaattaattgtaccagtgctgatttcttttgcattgagtctgctgatgggaccggtcgtcattccgtttctgagaaaactaaagatgggacagacagaacgggtggaaggtgtacagtcacatttgaagaaggcaggaacaccgacaatgggcggtgtgatcatccttggaagtgtattgctcacttcagttttttatataaaagaatatccgaagatcataccggtgctgtttgtgacacttggttttggattgatcggatttctagatgattatttgaaagttgtgatgaaacggtcggatgggttgtttccaaaacagaagatggcgcttcagattgttgtgacggcagtgtttgcctactatcttgtaaaagtgacaaatgttccaatgacactactgattccattttccagtggaaaatatctggatatcggatggctttcgattccgctgttgtttgttgtcgtgattggaacggtcaatggagtgaatttcacggatgggctggatggcttggcctccagtgtgacggtgcttgttgctacatttttcactgtagtggcagtggggacgagaagcggtatcgagcctgtgacctgtgcggttgtgggagcgctgcttggctttttactctttaatgtctatccggcgagtgtgtttatgggagataccggatcgcttgcgctgggaggatttgtggcatccacagcatatatgctccagatgccgctcttcatcgtgatcgtagggctgatttatctgattgaagtgctgtcggttatgattcaggtgacatattttaagaagacaggcgggaaaagaatctttaaaatggcgccaattcatcatcattttgaactttgcggctggtctgagacacgggttgtagcagtgttcgctgttgcaacagcaattttatgtctgattggcctgatggcgctttaggagggtattatggatttaagaggaaaaaaagtacttgtatttggaacaggaatcagcggaattggtgcaggagcgctgcttgagagggcacaagcgtctgtgatcctgtacgatggaaatgaaaatttagacaaagaaaatttaagaaaacattttgcggcagagagctctgttgagatcttgctcggcagccttccactggaagtgatggatcagctggaacttgttgtgttaagtccgggggttccgacagatcttccgcttgtaaatcagttgagagaacgagaaattccaatttggggagaagtggaactggcataccgctttgcaagtggagaggtgcttgcaattaccggaacaaatggaaagacaacaacaactgcattgctgggggaaatcatgaaagcgtacagagacagtgtttttgttgtcgggaatatcgggacaccgtacacgggagcttcgttggagatgaaggaagattctgtgacggttgcggagatgagcagctttcagttggagacgatcgatacgttccatccaaaggtaagtgcgatcttaaatattacaccagatcatttaaaccgacatcatacgatggaggcatatattcaggcgaaagaggaaatcacaaaaaatcagacagaggaagatgtctgtgtactcaattatgaggacgaagtgctgcgtgcattcggagaaaaacttcatacacaggttctatatttcagcagcaggcgtaaactagagagagggatctatcttgaagacggaaagatcatttatgcagatggaaagccggaagtgctctgtaaggtagaagaactaaagttgcttggtacacataattatgagaatgtgatggcggcttctgcgatggcagcggcatatggagtcccgctttcgagtatacgagagacgatcaggaatttcggcggagttgcccaccggatcgaatttgtgacggagaaagaaggggttgcatactacaatgactccaagggaacaaatccggatgctgccatcaaggcagtggaggcgatgaatcgaccgacgatactgatcggaggaggatatgataagaactcttcttatgatgagtggattgattctttcggggaaaaagtaagataccttgtattagttggagcaacaaaagagaaaatcgctgagaccgcaagaagaaaaggatttgacaatgttatcctcgcagatacttttgaggaggctgtcatggagagtgcgcgacttgcaagagagggagatgcagtacttctttcccctgcatgtgcgagttggggcatgtttaaaaattttgaagaacgtggagataaattcaaagaacttgtaaatcatttataaggagtgaagaattgtgggcagacccggaaagaaaaaagggtatgattacacattgcttgcggttgtatttctgctcgtgttcgtaggattgatgatcttgtacagtacgagtgcctacaatggtgagttaaaattccacgatcgtttttactatttaaaaaaacagttgtttgcaacgattttaggaacggttctgatgctggtcgtggcaaatatcgattatcatgtctgggaaccgcttgcaggcattggctatcttgttgcaatcgggctgtctgttgcggtgatttttataggagatgagtataatgggtccaaaagatggctgtctttgggacctttatcttttcaaccgtcagagtacgcaaaggtggcgctgattctatttcttgcatgtattgtgaccaaaaatgtaaaagagatgggaaagatcaagactttgtttaagattatgcttatggtactcccggttgtcggtcttgtcggggcgagtaatttaagtactgcaatcattattcttgggattgcagtcattctgatttttgtggcaagtccaaagtatgcacagtttatctggatggggctgcttggatgtggattccttggtattttcctcggggtggagagttatcgcctggaacgtcttgcaatctggagaaatccagaaaagtatgagaaaggttatcagacattgcagggactttatgcaatcggttccggaggactttttggacggggaatgggaaacagtgtacagaaactcggatttgttccggaggcacagaatgacatgattttttccattgtctgtgaagaactgggacttgtgggagcggcactgatcatcctcttgtttttgcttctgatctggcgtttctttgccattgcagttcatgcgcaggatctgtttggagcgctgatcgcatctggagcaatggcgcacatgatgatacaggtgattttaaatattgcggtagtgacaaatacgattcccaatacaggaatcacacttccgtttatcagttatggagggacatcggttctgtttcttttgatggaaatgggacttgtgctgagtgtgtccagtctgatacaataaagagaacatccggcgcggaaggacgcgacggcaacaaagttgttaggaggataggatgacgacatttaaacatcgtaaagtacaaaagaaaagaaaatatggactttatgcattgcttgtaggtttgattgcagcagcaatccttgcgctgtctgtatttttgctgtttcatatacaaaagatcgaagtgacgggaatagagatgctgacacagcaggaagtgtcagactgggtaaaaagtgacacaatgtccggcaattccctatacgttctctggaaatccaagtttcgtccggacaaattacttcctatgatgaaaagtgcagagatcagtatgaagaatccgtggatgatcaaagtaaagattgaagagcataaattacttggcggaattctttatgagaatgaatatgcctattttgatgaggaaggaaccgtcttaaagaaacagacagagtccattccggggattccgcttgttgaggggctgggtgtgaaaaaggttgtcttaaatcataaagtaaaagcggagaatcgaaaggtattcagctatgtcatccaggttggaaaagttgtggaaaaatgggaacttagtccagagaagattgtgtttaacggaacagaggccacacttcattttgggacgatcgcagttaatatcggcgatgagaattttgatgacagagttgctcagattactccaattttagaaaaacttcagggaaaaagcggaactgttcatttggaaaactttacaatgcagtcaacgctgatcagcttccggccgacagtagaggcagaagatggaactgtgacagaaggggaagatcagatacttgatgaaaccggagcgacagacagcggtgaacagacagatgctgacagttataatgaagactgggaagcagaaccacagtatgatgagagtgtgacttatggcgatggaacggaaatctatgatgacgaaaccggaagttatgaggatggaagcggcacatacgatgacggaagtgaaaattatgatgggacaggcacttatgatgacggaagtggaatggggtattagaaaatgatactgcatctgctttgaacggagagtgccacgacaaaaaaatcggaaaatctaaaaaaggctattgattaattagaagaaaaactatattatatatctatatggcagaatctatatagaaccagagggatgtataagaagtagatcgataaaggaggaaaaactcttgttagaaattaaaacaaatgaatctgaagcagcagcaaaaattatcgtcattggtgtcggtggcggcggaaataacgcagtgaaccgaatgatcgatgaacagatcgccggtgtggaatttattgctattaatacagataagcaggcattacaattatcgaaagctcctacattgatgcagatcggtgagaagcttacgaaaggacttggagcaggtgctaaacctgagattggtgagaaggcagcagaggaaagctcagaagaaatcgcagcagcaatcaaaggtgcagatatggtattcgttacttgtggtatgggaggcggaaccggaacaggtgcgactccggttgtagcacgtatcgcaaaggatatgggtgcactgacagtcggtgtagttacaaagccattccgttttgaatccaagacaagaatgaacaatgcgcttgcaggaattgagaagttaaaagagagcgtagatacgttaatcgttattccgaatgataaattactggaagtagtagaccgcagaacaacaatgccggaagcactgaagaaggcagacgaagttcttcagcaaggtatccagggaatcacagacctgatcaatgtaccgtctctgatcaaccttgactttgcagatgtgcagacagttatgattgacaagggaattgcacacatcggaattggtcagggcaagggagatgacaaggcattagaagctgtgaaacaggcagtggcaagtccgcttcttgagacaactattgcaggtgcttctcacgttattatcaatatctcaggagatatcacactgatggatgccagtgatgcagcagaatacgtacaagaacttgcaggggaagatgcaaatatcatcttcggtgcaatgtatgacgattcaaagtcagacgaggcagtgatcacagttattgctaccggacttcataacgtggaaggaccgtcatccagactcaaatccagactggatggacagaagacaggcagtgtgcttccaaatactagtcacacagcagcttcagcagcaggaacagcatcttctgtaagacaggcaagaccagaattcagcgtaattggaaataacaccaatacatcagctggccagagaacttatacagggacaacaccggtgacaccgagagttccgacaagtacagtcagagagaaatccatcaagattccggatttttttaagaaatagaacgataaaatagcaaacacttatcttttataatagaagctcaccgaagagaactatagcaatgggacgagatccacttgttatagttctttttttgtcgaaaaaatcccaggataagaaacaaatatttgacaaattctgcagaagcatgcagatataataataagtacggaaatgaaaagatataaggaaagcggagcggaaaagaggtgggaaatgtattacgaagtgtacatagatgtgttgtttctcataaattttatgatggactacctgctgcttctgattgtgcgcagagtattgaaatgtactgccacacatggaaatatttgcgtggggagtatttttggagcggcagcggtctgtatttgcatgcttctcccggtaaggagtacactgattcgctttcttttgtttcatttatctgtgaatgcagctatgatctggatcgggttgaaaatccgaacactcagagaatttctaaaggcatttgcggcattatatgccagtgcatttctgcttgggggagtatttacatggctgcagccgtatgtgcgtgcgggaagtcttttttttggcgcagcagtcggaagttattatctggtgatcgggatctggaaatttcttttgtatctgcagcgaatgaataagtatcaatatacagttacagtgtatacttccggggagagctgcacgatacatgcgcttttagataccggaaacagcctgtgcgatccggttacggggaagccggtctgcattttaggaaagagacaggcaggggaaattctaaaagaaaaggaacttcagacactgcgctatatcccgtattgttcagttggaacagagaaaggggtacttccggtaatcagagcagaaaaaatgtgcattcataccgggaaggagtgttgggtggaaaagccgctcattggaatttgtgaggaagatagttttacaaatggggaatatcagatgattctgaatccagcaatattaggaggagtataaaatggtaacaaatgcaatgctgccaaagcagtttcggatgaagtttttgtcacagtttcgtaagatcgtgatagggacaaggagagaaatccattacataggagggtcagaggtgctcccggcgccattggagatggaagaggagagcgcagtcatcaaggaactggcaacagaatataatgaaaaagcaaaaaaggtgttgattgaacacaatctcagacttgttgtttatattgccaagaaatttgataatacgggaattggggtggaagatctgatctcaattggcacgattggtctgatcaaagccatcaatacctttaatcccacaaagaagatcaagcttgcaacttatgcgtccagatgtattgaaaatgaaattttgatgtatctgagaagaaataataaaacaaagctggaagtgtcgatcgatgagccactgaatgtggattgggatggaaatgagctattgctgtcagatatccttggaacggaagaagatacaatctaccgagatctagagacggaggcagaacagaaaatgctgcgcaaagcgattgaaaaattgtctccgagggagaagacgatcgtagagatgcgttttgggatcaatcgttctgaaggggaagaaaagacacagaaagaggtagcggatcttttgggaatttctcaatcttatatttcacgtttggagaagaagattatgcagagattaaaaaaggagattgtacgctacgaatcttaaaagaaaaataaaaaaagtataaataaaagaataaagactgaaatatatgccatttcgattgaaaatgtgttataatatagtaaattttatgacagtagttgcgaggtgttcctgcatattagacaaagaatatatagcggggaactgccgcaatcagaaaggagacttgcatatgaaacttacatttatcggtgcagcacatgaagtgaccggaagctgccatcttctggaagtcaatggaaaacacattctgatcgactgtggtatggagcagggaccagatctctatgagaatcaagagattccggttgccgtcggggagattgactatgtacttttgacgcatgcacacattgatcattccggtctgattcctctgcttgccaagcgaggatttcaagggcagatcgtaacgacttttgcgacagcagacctctgtcagatcatgctccgtgacagtgcccatattcaggagtttgaggctgagtggagaaatagaaaggcgagaagatctggtgcagaactttatgagccattgtacacgatggaagatgctgtcaatgcactgcaatattttgtaccgtgcgattacgatcagaaaattgagctttgcgagggcgtatgggtacggtttacagatgtgggacatttgctcggctctgcgagtatcgaaatttggatgtgtgaagacaatgtggagaagaagattgtattttcgggggatgtcggaaatatcaatcagccgatcatcaaagatccaaagactgtgcgtgaagcggattatgtagtaattgaatctacctatggcaacaggcttcacggagatgagattccagactatgtaggtgaatttacgagaatactcagggaaacttttgcaaaaggcggaaatgtggtgattccatctttcgcggtcggacgtacacaggaattactttattttattcgtgagatcaaagagaagaagcttttgtcagattttcctgattttgaagtgtatgtggatagcccgcttgcaatcgaagcgacgaacgtttttcagaagaatacaaaaggatgctttgatgaagatgcactgaaacttgtacaacaaggaatcaatcctctcgtatttccgggcttgaagctttccacgacgagcgatgattcgaggctgatcaattatgatagtaagccgaaggtgattatttcagcgtcgggtatgtgtgaagccggaagaatccgccatcatttaaaacacaatctgtggagaaaagaatgtacgattctgtttgtcggttatcaggcggtgggaacgcttggaagaaagctaatcgaaggagtaccgtctgtcaagctgtttggtgagacaatagaggtatgtgcaaagattgagacgttgaaaggtatcagcggacatgcggatatgaaaggcttacttagctggcttggtggatttgagacgaagctttcccatgtatttgttgtgcatggggaggatacggtgacagatgaattcgcaaagacgattgaagaacaatttggatgccgggcatttgcaccatattccggaggatgcgtggatctggtgacaaatgaagtgctcacagctggcgcgagagttccgaaaaaggcaaaggaaaaaccgatggcggcacgtgctgcgactgcattccagagagtggtttctgcaggaaaacatctcatggaagttattttcaaaaacgaaggactgtccaacaaagatctggcaaaattcgaatcacagattcagaatcttgcagaaaaatgggatcgtgattagagaagaaagtaaccggaatgaaaaatagtagaaggaaagtggtataactgccggagattgtgagaatcctctgactagaaaatgttctaggaggaaggcagtcatggcattaagtaaagttgaaatatgtggagtcaatacagcgaagcttcctctcctaagcaatgaggagaaggaagctttgtttgtgaagatcaaagaaggggatgaagcggcgagagagcggtatatcaagggaaatttaaggttggtcctgagcgtgatcaagcggtttgcaagcagcaatgaaaatgtcgatgatctttttcagatcggttgtgtcgggttgatgaaggcgattgataatttcaatacagatcttcaagtgaaattttcaacctatgcggttccgatgatcataggagaaatcaggagatatctaagagacaataattccatccgtgtgagccgttctttaagggatactgcgtataaggcaatctatgcgaaagaaggctatatgaaaagacatttaaaagaaccgacagtagaagagattgcagaggagattggaattgcgaaagaagatattatctttgcactggatgccatccaggcaccgatgagtctgaatgagccggtgtataatgacagtggagatgcgctgtatgtgatggatcagattagtgacaagaagaaccgggaggaatattgggtggaaggtctttctctggaagcggcgatggaacgtttgaatgaaagggagcgttttattatccagcttcgtttttttgaaggaaagacacagatggaagtggcgagtcaggtgaagatctcacaggcgcaggtaagtcgtctggagaaaaacgcactaaagacaatgcggcagtatttggcggggtaaaagaagcattgcgaaatccatctaggatagggcaaaagataggtagtgttattctgtgaaatgccggaagaaaaaagaaaaaagaagaggggaagacggtggagcagagacgaaaaacaatgaaaacactgctgattctagtgcttgtagcagtatgtactttgctttgtacagcaagtgagtccggggaagaagaaaatttcttgttgaaatttgagcctattcatactattatatggatataaaggagagagacaatgtataaagcgtgcatatttgacttagatggaacattgacaaatacgctggattcccttgtaagatccgtgaatctgacgttgtgtgagatgggactgccagagattacaagagatcagtgcaggcagtttgtaggaaatggagcaagagtgctgatggagaaagcattgatggcttccggggcaagagatctttcaagaatagaagaggcgatggagatttatggaagaatatttcatgataactgtatgtatcatgtagaaccatatgcgaagatccgagagcttctggaaggattaacggaacatcagattgagagggcggttttatcgaataaaccgcatgcccagacggttcaggtagtgcaggatgtatttgggaaagagttattttcctacgtgcaggggcagtgtgaagggtatccgaagaaaccggatccgacgatggtatttgcgattgccagaaagctgggaaggaagatagaagaatgtgtctatatcggagattccgaggtagatatcagaaccggaagtgcagcgggaatgcggacgatcggagttacatggggatttcgttctaaggaagaattgctggaagcaggagccgtggagacggtggatgatccgctggaaatattggaactcatatcataagaaaaacatgcatagaaatacaaaaagaggaaatgaaggaggatatatgcgatgtacgaatatgatgaggattgtttaaaggtgtttttaaagaaccagtcacaattatttgatgagccggtggcagagacactggaggaagcagaagcgtttttagaggactgtatggcagtaatcgtagactctttgcaggaagtaagagagtattttgaagagaatggtgcagacgttgatggaatgtcagacgaagagcttgaggaggcttctgaagtgtttgcattgccgggcggacaatatcttgtcgtagaagggtagcatattagtctgtttatatggaaaaataactgctttgttgattgataagatcgtacaagaccaactaagagggcagaacattataaaagccgcagtcatttgactgtggcttttttgagtgcttcttcgatggtatctaagatgacttgggaagtatagggattctcttgcggcagagaaatattttcaagagactgtgtgtcgtatacttgctctgcaatatcttcgatcgccggttggatcaaaggaaacatagtagttaccgtgtcatctagatttgagaaacggatagaattgatgtgggaggcgtcgacggcgacttccacttccagatcggtgttgttcagtgtcagtgtggaagtgtatatgccgggttgatattgcttagctccaggactcccctctttcttttcaggaagaaacataaaaaagagaaggagcagaagcaggataccaagtacaatgaaaatagtagtgtagatgatttccttcatgtgaaggacgacgatttttgttttcgaactcatatatgcctcctgtgaatgtatgcttgaaaaagaactatgaaataattgttttaatatactttatgatacggcagaaggaaatatgcgtgacaaacaggggcgtatcctgtaaaatgggaacggaggtgacaatgtatgtatattattattggattaggaaatccgacagcacagtacgaaggaacaagacataatgtcggatttgatgtgatagaccgactgggagagaaatataatatagctgtggatacaaagaaacacaaggcatatatcgggaaaggtatgatcgatggtcagaaagtgatcctcgtaaaaccgcagacctatatgaatctgagtggagagagcgtgagggaacttgtagactattacaaagtggatgcagaagaggaagttcttgtgatttacgatgacatcagtctggatgtcggacaacttcgaattcggaagaaaggaagtgcgggaggacacaacggaattaagaatattattgcacatctcggcacacaggtatttccgaggatcaaagtaggagttggggagaagccaaagaattacgatctggcagattatgtgctgggacacttttccaaggcagagagagcgcagatggaagaagggtatgatcgtgcgacagaggctgtccgtctgattcttgcaggagaaattgatgctgcgatgaaccagtataacaaaaagcagacgacggtataaaaatgaaaggagtaggtgtgtatggaagctcttttggagcctttgagggaactggcagagattgaagagattcagaacgaaaagaaaaaagaagcaggattgattcagattacaggatgtgtcggttcacagaagacacatctgacctgtgcacttggcagcgactgcaagtataagttgattgtaacttccggagaatcaaaagcaaagcagatgtatgaggagtatcgtttcttaaaggagactgtatatttatatcccgcaaaagatttgctgttttatcatgcagatttgcgaggaaaacagcttgtcagcagcaggatggaaacaattcaggcacttctccttggggaagggtgtacagtcatcacaacatttgatgcgtttatggattctcttttgccgattgagacgatccgggagagaattttttctctgaaggtaggagatattattgattttgagaaagttcagaaagatctggcgcttcttggatatgaaagggaagtgcagattgaagggccgggacagtttgctgtgcgtgggggaatcttagatgtctacccgctcactgaggaggttccggtccgcatagaactttgggatgatgagattgattcgatccgcacatttgacgtggagagtcagagatcgattgaaaatctagaagagattacaatctatccggcgtccgagttcatggatgagaagacaaagcgcgtttcatttctagactactttccgcgagaagatactcttttatttttggaggagccggcacggctgatagagcagggggaagcagtcgaagcagaatttatcgagagtatgaagaagcgtgtggagaccgggtgcgaagtgtcagacgaagaagtgaagctgtttgcaccgaaggagattgcatcgaagatgaatcagtatccggggatcgggctgtcgattctggaaggaaaaagaaatttgtttcatgtaaagaaaagtattcaccttcaggtaaagggagtgaatccgtacaacaatagttttgagacacttacgagggatctggcgcggctgaaacggagcggctacagagtgatccttctatctggatccaggacgagagcaaagcgtctggcagaagacttgagagattatagtttgagcagcttttacagtgaagagatggatcgggaagtgcagccgggagagatcatggtcgcctatgggcatgtagatgagggatacgagtatccactgttaaagtttattgtaatctcggagacagatatttttggaaagaaaaagaagaaaaagaaacggaaaacttatgaaggacagaaaatccagagcttctcggatctgaaggtcggagattatgtcgttcatgagaatcacggacttggaatctatcagggaattgagaagattgaagtcgataaagttgcaaaagattatatgaagatttcttatgcagatggagggaatctttacattcttgcgacacagctggaactgatccagaaatatgcaagtgccgatgcaaaaagacctaagctgaataagctcgggggacaggaatgggcgaagacgaagacgagagtccgcggggcagtcaaagaaatcgcaaaggaacttgtggaattgtacgcagcaagacagaaggaagaagggtatgtctacggagaagatactatttggcagcgtgagtttgaggaaatgtttccgtttgaggagactgatgatcagttaaatgcgatcgaggcaactaaaaaagatatggaaagcaagaagatcatggaccgcttaatctgcggggatgtcggatatgggaagacagaagtggcagtccgcgccgcgtttaaggcagtgcaggaaagcaagcaggtggtgtacctcgttccgacgacggtgcttgcccagcagcattataatacgtttgtacagcggatgaaggattttccggtgagagtagatctgctgtgcagattccgtactccggcacagcaaagaaagacaatcgatgatgtgaggaaaggtcttgtagatattgtgatcgggacgcaccgcgtactttcggatgatctgaaatttaaggatcttggcctgttgatcatcgatgaggagcagcggtttggggtacagcacaaagagaaaatcaagcagatgaaagaaaatgtagacgtgctgacactgacagcaactccgattccgagaacgcttcacatgagtctgatcggaatccgcgatatgagtgtgttagaagagcctccgatggaccgaatgccgatccagacatatgtcatggagtacaatgacgagatggtacgtgaggcgatcgagcgggaactcgcaagagatggacaggtgtattatgtgtacaaccgggtgcaggacatcgatgaagtcgcagaccggattcagaaacttgtgcctgaggcaaatgtggcatttgcacatggacagatgagggaacatcagctggagcggatcatgtatgattttatcaacggagagatcgatgtattgatctcgacgacgatcattgagaccgggcttgatatttccaacgcaaatacgatgatcatacacgatgcagaccggcttggactttctcagctgtaccagcttcgcgggcgtgtcgggcggtcaaaccggatggcatatgcttttttactctataagagagataagctgttaaaagaagtggcagaaaaaaggttgtccgcgatccgtgaatttacagacctcggttctggatttaagattgccatgagagatttggaaatacgaggagcgggcaatcttcttggggcagagcaacatggacatatggaagcggttggatacgatctgtactgtaaaatgttaaatgaggcagtgaagcatctgaagggtgaagtagaggaagaaccatatacgacaacggttgacctaaatgtggatgcatatattcctgcatcgtatattccgaatgaatatcagaagctggatatctataagcggatcgcaggaattgagacagaggaagagatggatgatatgatcgaggaactgatcgatcgctttggagatattccaagaaaagttcaaaagcttctggcgattgcgaacctgaaagcgatggcacaccgactgtatattacagcagtagaacaaaagggagaagagtatcgatttaccatgtttgagcatgccagaattcggacagaaaaaattccgaagcttttggaactgtacaaagaagagttgcatttcaaaatggatacgcccccatatttcctctatcataagaagaacagaaaccgaaaaggcaaagaggaagatccaattgaagttgtgaaaaaagtgttaattgatatgaaaacattgctagaatcatagtcagagagtataatgagagagttagaaacacgaaggagggcaattatgagaaggacaggaaaaaaagcggcagcgcttgctgtgacagcagcactggcggtttccgctgccggctgcgggtctgtcaaagacagcgatgtggtagttacgattggtggagaaaaagtgactgtaggtgttgccaatttttttgcgcgctatcagcaggcagaatatgaaacatactactcaggagtgatgggagaggacatgtggtctacagagatttccaaagggaaatcctatgaggagacggtgaaaaatcagatcttagagacactggaaaatatgtatgtactcgaagaccatatgggcgattacaaagtcgagatcaccgaggaggaaaagaagaagatcagtgaagcagcaaaagcgtttgatgaggcaaacggactggaagaaaaggaagctgtttccggaacaacagaaaatgtagagcggatgctgacacttgtgacgattcaagagaagatgcagaaggcgatggtcgcagatgtggatacagaagtgtctgatgaagaggcggcacaaaagagtatggagtatgtcaacctttctctgacaaagacaaaagaagacggaagcacagagcagatgaccgaggaagaaaaggcagaggcaaagaaaaaggcagaagcattccagaaagcagttaaggaaggggctgactttgcaaagactgcaacggagaaggaactggaagtaaagacaatgacttttgacgaagagacgacaactccggatgagggattgatgacgaaggcgaataaacttggtgaaggggaagtctcagaggtgatcgagacggacagtggctactatgtgttgaaagtgacaagccttcttgaccgggaagcgaccgatgcagaaaaagaatctatcgcagaagagcgaaaggaaaaacagtacaaagatctgtgcgaagagtggaaaaaagatgtaaagattgaagtcaatgaaaaggtgtgggataagatcagtttcgagaaaaaagggattaagatgaaacagcaggaagagattccatatgcagaaggatctgacacagataaaagtgaccaggaataatcgaaaataggagaatggaggagatttgatgagtaagattgaagaagtaagaagtgcgatggtaagtgcgatgaaggcaggggacaaggagacgaaggagtccttatcactgcttttatctgcgctgaagaataaggcgattgacaaaaaaggagatctgacaccggaagaagagacacaggttatcctaaaagagatcaagcagacaaaagagacgttggaacttgcaccggcagaccgaagtgacattgtggaagaatgtcagaagagaattgcagtgttggaacagtttgcaccaaagatgatgtcagaagaagaaatctgcggagtgatcaaagaggtgcttgcttctctggcgctggagacaccgacagcaaaagacaaaggaaagattatgaaagaactgatgccgaaagtaaaaggaaaggcagatggaaagcttgtaaatgacatcgtactgtcttttctgaactagttcgggaaaacggaagatctcccgaaaaagcgatgagagaatgtgctaaaaaagttctgaaaaagatgtaaaaaaagattgtttaattgcaacggctgatatagtatagaggtaacaaaaaggagaaagggcggaggtatatgatgagcattgtatggttggcgttgattgtgatttttctgatcgttgagatcgccacagtaggactgacttccatctggcttgcaggaggtgcactggcggcactggtggtagaacttcttggacttggaatcgtatggcagatcgcagcttttctgatcgtgacttttatactgttatattttacgagaccttgggcgcagaaatatttgaatgcgaaatcagtgaagacaaactatgagagtctgatcggacagaagattaagatgacagagcgggtagataatttgagtcagacggggaaagcagtcgtcaacggacaggaatggacggtcagagcggaagcagatggagacattctggaaccgggcgatttcggagaggtactcagggtcgagggtgtaaagctgatcgtaaagaaaatttgacaaaaaaagaaagtatggtacaatgctatatgaaatgacaaatttcatatagcattttgctaggggagcccagggctgagaaatcacattgcgtgatgaccctcactacttgaaccggttagtaccggcgtaaggaagcagtaccagaatggttcctcctgtaaaaaaataataaaggaggtttttttatgtcattttttgtaacaaaagcagatggggcatacagtctgacaacggcaggttatgtggcagttgctgtgattcttgtggcgttgatcgttgtagctgcgctgcttgcaaaacgggagaagaaagaaaaaaagaaaattggaacaaaacagcttgtcgtatgtgcgatggcagttgcacttgcgatggtgacatcgatgttaaagatttattcttttccatttggtggatcggtaacattattcagcatgttgtttatctgttttgttggctatttatatggaccggcgacggggatgctgactggggcggcatacggggtacttcagcttctgattgaaccatatatttatttcccacttcaagtacttgtagattatccgctcgcattcggggcactcggactttcaggatgtttcagcaaatccaaacatggtcttgtaaaaggatacttgtttggcgttcttgcaagatatgtatttgcggtaatttccggatggctcttttttggagaatatgcgtgggacggttgggcggcgcttccatattcgcttgtatataacggatgttatatttttgcggaggcagcgcttacagttctcgttttatcgattccggcagtctccaaagcgatgaagaaagtgaagataacagcggtcaactaatcaatcggatagaattaaaaataaaaatgtcataaattccttcattttacagatactatttccagaaatggaaaacaaagtaaaatggaggaattttttatatgaaagcaacaggagtcgtaagaagaattgatgatctcgggagggttgtaattccaaaggaaatccgacggacactcaggattcatgaaggagatccacttgaaatctttaccgatcgagagggaggtgtcattttaaagaagtattctccagtcggagaaatgacaccgcttgccatacagtatgcggaaagtcttgcccaggtagcaaaatgtactgtctgcatcaccgatcatgagacggtagtcgcagcggcgggaaatgggaaaaaagaatttgcggggaaacgagtcagtgagacgtttcagacctgtctaagtgacagaaaggagagatgtgcagccagaggggagaaaggatttgttttattgacagaaggacagagcgcagtctttacggaggaaatcatcagtccgattgtggcggagggagatgtgatcggtgcggttgtacttttgatgaaagaggaaacaaagaggacggaagatggagcagaaaagcttgcacttgcagcggcagcttttctcgggaaacagatggaattttaagatggtcataaaacattgtggacgggcatagattagagtgtacttattatttggtgcaaatacgcttgaaatctgggagggacgacaatggagaagacaatcagacaggaaatgaaagtcacatgggtgttaaaggcgctgatggcagcttacgttgtgaccggcttacttcttttgctgctgacgctgcttgtatacaagatggagttcagtgaggaaaaggtgacggcggggattacagcgatctatgtactgtccacatttgtgggcggacttgtgatcgggaagctttccaaaatgagaaaatttttgtggggacttgcggtcggaattttatatttcgggttattgcttttgatttcctttgggatttatcgtaccttacaaggaaatgggacgaatattttgacgtcgttcctgctctgtgcggcaggtggaatggcgggtggaatgatttcttaaaagaaagtcttttaaatcttacatgcatgtgatataataagctaagttaatgctaatttaaggaggaatgtaagatgaagcacattaaaacattaaatactcagacattaaacaatacaatgaaaaaaggcggatgtggagaatgccagacatcttgtcagtcagcatgtaagacatcttgcacagttggaaatcaaacttgcgaacaaaagaaataagctaacatcgcacagattgagatcaggcagcggcttcggtcgctgctttgtctttgcgttaagaagaaaggagcagaacacaagtgattcatcagtatgtaaataatgggtatcacatcgtgctggatgtcaacagcggttccgttcatgttgtggatgaactttgctatgatgtcattcaggcgctggatacaatgggaatagatcaggcagaaaatcctgtggaagaattaaaaaaagaagaaacagcagcagggcttttggagaagctttcagcaaaatatgcagagagtgatctgaaagatgcctatggagatatcgtggaactgacagaagcaggtcagttgtttacaaaagatatttatgaacagtatatcggggaagtgaagcagagaaagacagtggtaaaggcgctctgtatgcacatcgcacatgactgtaatcttgcctgcaaatattgttttgcagaagaaggagaatatcatggaagaagagcgctgatgtcctatgaagttggaaagaaagcgctggatttcctgatcgcaaactctggaaacagaagaaatctggaagtagacttctttggaggagagcctttgatgaactggcaggttgtcaaagacctggtggcatacggacgtgagcaggaaaagatacataacaaaaatttccgttttacgatcacaacaaacggtgtacttttaaatgatgaggtacaggaatttgtcaacaaagagatggacaatgttgtcttaagtcttgatggaagaaaggaagtcaacgataagatgcgtccgttccgcaatggaaagggaagttatgatctgatcgtgccgaaattccagaagcttgcagatagcagaaatcaagagaaatactatgtgcgtgggacatttacaagagataaccttgatttttctaaagatgtgctgcattttgcagatcttggtttcaaacagatctctattgaaccggtcgtaggggaagattcagatttctattctattaaaaaagaggaccttccaaagatctttgaagagtacgatgcacttgcaaaagcactcgtagagagagaaaaagaaggaaaaggagtgaatttcttccacttcatgatcgatctcgacggtggtccgtgcgttgcaaagagattgtccggatgtggttcaggcacagagtatcttgcagtgacgccttggggagatctttacccttgtcatcagtttgtaggagaagaagagttcctgatgggaaatgtagatgacggaattgtgaagccggagatcgcagaggaattccggggatgtagtgtatactccaaggaaaaatgtaagaattgttttgcgaagttctactgcagcggtggttgtatggcgaactctcagaagttccacggatcgatccatgacacatatgacatcggatgcgagatggaaagaaagcgtgtagaatgcgcgatcatgatgaaggcagcattggcagagtaagggaaagaaggtaacaggacatgaaaaaatcaagaggagtatggagcctgatcgcgactacacttctgatcgttttgctcggatttacgacaatcgtcggattcggaaagggaaagattggttctgcaaagaacatcacactggggctggaccttgccggtggtgtgagtattacctatcaggcgaaggataaaaatcctacttcagagcagatgagtgatacaatctacaagcttcaaaagcgtgtggagcagtatagcacagaggcgacagtttaccaggaaggtgacgaccggatcaacattgagattccgggtgtgacagatgcaaataagattctcgatgaacttggaaaaccggggtcattggtattccaggattcagaaggaaacgttgtcttagaaggaacggatgtgaagacagcttctgcaaagacaacgcaggatgagatgaacaataaagagtatatcgtggaactgattctcacaaaggacggtacagataaatttgccaaggcgacagcggaaaatcttggaaaacagattgcgatcgtctatgatggaaagacgatcagcaatccggttgtacagtctgagattgatggcggacaggcctatatagacggaatggcttcctatgaagaggcagaaaatctggcatctacaatccgtatcggaggacttcagctggaactggaagaacttcgctctaatgtagtcggagcgcagctcggagaagaggcaatcagcacaagtcttcttgcaggagcgatcggacttgcgatcgtgcttgtatttatgtgtattgtctatctgcttccgggatttgcatccagcattgctctgatcatttacacaggactgacgctggtacttttaaatgcatttaatatcacattgactctgccgggtatcgctggtatcgtgctgtctatcggtatggcggtcgatgcaaatgtcattatttttgcgagagtcagagaagaactggcagcaggaagggctgtgaaatcagcgcttcgcatcggatttcagaaagcattgtctgcaatcattgatggaaatatcacgacattgatcgcagcactggtacttggattaaaaggaacaggaagtgtcaaagggtttgcacagacacttgcacttggtgtggttgtgtccatgtttacagcactgttcattacaagaatcattatcttctcgctgtatgcgattggtttccgagatgtgaagttttatggagcgaagaagacaacgaaagttcgtaacttcctcggaaagaaagcagtctgctttgctatctccggagtgatcatcctcggcggacttggaattatgggataccatgcagcaaaagggcagggggcatttaagtacagcctggaatttatgggcggtacttccacaaatgtgacattcaatgaggattactcaatcaaagagattgattccaaagtggttccggttgttgagaagattacaaaagatgcaaatgtgcagacacaaaaagttgatggttccaatgcgatcattatcaaaacgagaagtcttgacttagaggagcgtgaagcatttaataaagcaatggtagacaattttgatgtggacgaaagtctgatcacttctgagaatatcagctctaccgtaagttccgagatgagaagcgacgcagttgttgcgcttttaatcgcgacagcctgcatgcttctgtatatttggttccgctttaaagatgtgcgctttgcaacaagtgcagtcatcgcattgttaaatgacgtactgtttgttgtagttttctatggagtggcaagaatttctgtcggaaatacatttatcgcatgtattttgacaatggtcggatattcgatcaactcgacgatcgttatcttcgaccgtatccgtgaggaattgaaagtgcaaaaacgtaatgaagatttggcgacacttgtcaaccgctgtatttctgagacactgacaagaagtatctatacgaactttacaacttttgttatggttgtaattctctttattctcggagtaagctctgtgaaagaatttgcggcaccactgatggttggaatcgtaggaggaactttctcttcaattacgatcacaggtgcactttggtacattatgaggacaaagattcagaagaaaaaatagaaaaagacaggggcgggagaacgaggaggttcttctgcccctgtttttcgatgaggtatatgatggaaaaatggtttattatgcggaagggtgcaccgtttcaggaaattgcacagaaatttcacatcagccccattctcgcaagactgatccggaaccgggagattacggatgaggaagagatcagactttatttaaacggaacgatcgcagaactccacgatggaattctgatgaaagatatggaccgtgcagtggaaattttaagtgagaagatccgggaaaaaaagccgatccgggtgattggggattatgatattgacggggtgaatgcaacatatattcttttggaaggaatagaaaagcttggtggagttgtggacagcgacatcccggatcgtatgaaagatggatatggactgaatcaggaattgatcaaccgtgcgctggaggcggggatcgacacaatcatcacttgtgacaatggaattgcggcggcagaagagattgcctatgcgaagaagatggggatgacgatcattgtcacggaccatcatgaaatcccatatgaagaaaaaaatggggaaaaagtgtatgaacttccaccggcagatgcggtcgttgatccgaagcggatcgactgtgaatatccgttctcttccctatgtggcgcggcagtggcttataagctggtggaaacactcttcaatgtgatggggcaggacgtggaagacgtagattatctgatggaaaatgtggcgattgcgacggtaggagatgtgatggatcttgtcggagaaaaccgcatttttgtaaagcagggactggagatgctaaagtgtacaaaaaactatggactggatgcgttgatcgaatgcaccggcgttgaccgggcacatttgtctgcatatcatattggatttgtcatcggaccatgcctgaatgcgggaggaaggcttgacacggcgaaacgggcattggaacttttgcgagcctctagccggagggaggcagatctgcttgcgggggatctaaaagcattgaatgacagccgaaaagaaatgacacaggcaggggtcgaggaggcggtgaagatggtagagacaacagcgcttcaggaagacaaagtgcttgtgatttttcttccggactgccatgaaagtctggccggaatcattgccggacggatcagagaacggtatcacaagccggtatttattcttacaaaagcagaacagggagcaaagggctcaggcaggtcgatagagaattatgatatgtacgaggagatgagtaagtgcaaagctttgtttaccaagtttggaggacataagatggcagcaggattatcgcttccggaagagaatatcgaagtatttcgcagacaactgaatgagaaaacagtgctgacagaagaagatttctgtgagaaagtatcgatcgacatgcagatgccactccgatatgtgacagaggaactggtagaggaactggaacttctggaaccgtttggaaaaggaaatacgaaaccggtttttgtagaaaaagatatgcttgtcctaaatagccggatcctcggaaaaaatcagaatgtgctgaagatgcaagtgaaagacttgggaggaacggtgatggatgcgatttattttggagaggcacaggaatgtctggaaaaaatcaggagagcagggggaaaaatcacagcgacgtattatccatcggtcaatgaattccgtggacagaagacacttcagatcgtgatacaaaattacaggtgattcgatatgatataaatgttgtttcaaagcaaaaaaagtgatatactaaacaatatcgtttgaagcaaaggagaaggagggatcgagatgtcagaaacactggaaatcagaccaaaagaatttaaaatggtggacggccacgcagttaaggagccggaagactatcaagatcccgaactgttgtaccagtcattaatcaagaggataagagagtatcatccatcggcagatatctctatgatcgagaaggcataccggattgcaaagcaggctcacgaaggacagaagaggaagtccggagagccttacatcatccatccactttgggtaggaatcattctggcagagcttgagatggataaagagacgatcgttgcaggaattttgcatgatgctgtggaagatacgatcatgacgagggatgatattgagagggaattcggcgcggaggtagcactccttgtggagggggtcacaaagcttggacagttatcttattcaaaagatgtcgataagatggaacttcaggcagagaacttaaggaagatgtttcttgcgatgtccaaggatatccgtgtgatcatcgtgaagctggcagaccgtctgcataatatgcgtacggcacagttctggccaccgcacaagcagaaggagaaggcgagagagacgatggatatctacgctccgatcgcacagagacttggaatttctaaaatcaagaaagaactggacgatctggcgctgaagtactatcagccggaagtgttctatgatcttgtgaagcagattaatgaccggaagacagagagggaggaatttgtacagcagattgtagatgaggtggcaagccatatgaagaatgcggacattcaggcagaagtctatggcagagtgaagcatttcttcagtatctataaaaagatggtcaatcaggataagacagtagatcaggtctatgatctgtttgcggtccgcatcatcgtagatacggtgaaggattgttatgccgcgcttggtgtgatccatgagatgtacacaccgattccgggaagatttaaagattatattgcgatgccaaaggcaaatatgtaccagtctttacatacaacgctgatgggacctgcaggacagccgtttgagatccagatccgaacgaaggagatgcacaagacggccgagtatggtatcgcagcacactggaagtacaaagagagcggggatggcaagaagaatattgccatgcaggaagaggagaagttaagctggctcaggcagattctcgagtggcagcagaatacggacaatcgtgaatttttaagtctgttaaagggcggtctggatctgtttgccgaagatgtttactgctttacgccgaacggagatgtaaaaaatcttccaaatggttcgacaccgattgatttcgcctatgcgatccactcggcagtcggtaacaagatggtcggggcgagagtcaacggaaagcttgtgacgattgattacaagattcagaacggagaccgcattgagatacttacatcacagaattctaaggggccgagccgtgactggttgtcgatcgtcaagagtacgcaggcaaagaataagatcaatcagtggtttaagaaggagttcaaagaggagaatatcatccgcggaaaagagatgcttcaggcttattgcaaggcaaaatctctcgtgttgagtgacctgacaaagccaaaatatatgcaagttgtgcagaagaaatatggattccgagactgggatgcagtgcttgcggcgttgggacatggaggactcaaggagggacagattgtcaatcgccttgctgaggaatatcagaaggatcacaaggaagaaatcacggatgagacgattcttgagaaagtgtcagaggcgtccaaacataaagtgcacatcgcaaaatcaaagagcggaattgtcgtaaaaggaatcgatgatattgcagtccgtttttcaaggtgctgcaatccggtgccgggggatgaaatcgtgggatttgtgacaagaggaagaggaatgtcgattcatcgcacagactgtgtcaatattcttcacttgtctaatgcagagcgtgcacggttgatcgatgcagagtgggaacagacagaaagcgatgcatccaatggacagtatatggcagagattaagatgtatgcgacagatcggcagggaatgctgatggagatttccaagatctttacggagaataagattgatgtcaagtccatgaatgtgcgtactagtaagcagggaactgcgaccattgagatgggatttattgtgcgcggtcgtgaggaattggcaagactgattgaaaagatgcgtcagttagaaggcgtgatcgatatagaacgtagtgtggggtaacaaaaagagatgaaagtagaacgttttttaactggaatattaagtacgaactgttatgttgcatggaatgaacagacgaaggaagccgtaatcgtagatccggcggcatattccaagaagttggcagaatttctccgagaagagggattaaagccgcaggcagtgcttctgacacatggacattttgaccatattatggggctggatgcattgcttgaggagtatccggttccggtatatgtccatggagcagagaaaggactgatcgcagatccgaagacaaatctttctttgacttatacaaacgggtacgtctttgaggatgcaacctatgtgacggacggtcagaagattgcggctgcaggggtgacatttgaagtattatttacacctggacatacatcgggcggatgttgttattacgcggagacagagaacatgttgttcagtggggatacactgtttcggtgttccgtcggaaggagtgatctgccgacgggggatgagacgacattgattcgttctatcaaggagaagctccttgttctgccggaaaatacagtggtatatccagggcatatggcagcgacgactattcagacagagaagacagcaaatccatttctggcgtaagtggtgaaaagataaaaccaattctgctcagaaaaatgtcagaatcatacaaggagcagaaaaggtgttttgtgtaaggtaactgagggcggggaagcattttcccgtccttccttcgtaagagagaagaggagtgctgtctgtgacagtggtgtaaaaaacacagtgagagaataaatgaggaagagaagagaatgattcgattacggataaaagacaaaagttatatctatgatgtatttcatattgtaaaagcatttttcccaaatgagacagtagagcaggaaattgatgaggagcagggaatgtttctggagctggaggtgtgtgtgcaggagcgcatttgcagaatctgtgcggagataaaggaactggatgcatatgagacaaaaaaagagaagaagcagtatctggaccgaaagatttaccgggcgcttgcagaatattccgggaaaacgctggcgtggggaatcctaacggggatccgcccgacaaaaatcgcaatgaagatgttagaagagcagatggagaaagaagagattcagagaactctcatggaacaatatctgatgagtgaggagaaagcacgccttggaatcgagattgcaaagcgcgagaaggcccagctggagcagcttgattatgaagatggatatagtctctatgtgggaatcccattctgtccgaccacctgtgcgtactgttcgtttacctcatacccgatcgaagcatggaagacgagggtggaggaatatctcgatgcactttgcaaggaaatcagctatgtcggggatatttcaaaagagaagaaattaaatacaatctacattggtggaggaacgccgacgacgttggaagcagatcagttagatcgtctgctcacacatttggaagagacattttcttatgaggagataaaggagattaccgtggaggcagggcggcctgacagtattacaagagaaaaactggaagtgctgaagcgccacaagattccgcggatttcgattaacccgcagacgatgcagcaaaagactttggatctcatcgggagaaggcataccgtggaggatattctccgcgtgtatgggatggcgagagaattggagtttgaaaatatcaacatggatctgattgccggacttccgggagagacggtggaagatgtcaaagacacgttaaggcagattgaggaactttctcctgacagtattacggtgcactcgctggcagttaagcgtgcatcaaggctggcacagatgccggaattgaaagaggctgcgctccaggaggaaagaggacggcagatggaagcgatgatagatctcgcagcggagagtgctgcgcggatgggaatgaaaccgtattatctgtatcgccagaaaaatattgccggaaattttgaaaatgttggctatgcaaaggttgacaaagcaggaatatacaatatacttattatggaggaaaaacagtctatcgtagcagtgggagcaggagcctccacaaaggctgtattttcggcggcagaagaccagttaaagaacggtcagccgggaaaagaagtaaaattagaaaaaaggattgagcgtgtggaaaatgtcaaagatgtgggacagtatatcgcacggatcgatgagatgatagagcgaaagggagaactattatggcattaaagaaaaagcccgtaaccgggatgaaagatatgttaccgagagagatgcagatccgggattatgtgatccgtctgatcaaggagacatatggaacatttggattctcttcgattgagacaccatgtgtggagcatatcgagaacctgtcgagcaagcaagggggagagaatgaaaagttgatctttaaaattttaaaacgtggagagaagttaaagctggacacagcagaatgtgaggcagatctcgtggatggtggactcagatatgatctgactgttccgttatcccgttattattccaacaatgtcagtgagcttccatctccgtttaaagcgctgcagatgggaaatgtgtggagagctgaccgtccgcagagagggcgcttccgtcagttcatgcagtgcgatattgacatcttaggagaaccaaataatcttgcggagattgaattgatccttgcgacgacgacactgcttgggaaactggattttaaaaactttactgttcgtatcaatgaccggaagatcttaaaggcgatggcagcttatagcggattcgaagagaaagactatgatgatgtatttatcatcctggacaagatggataagattggtctggacggtgtagaaaaagaactgcaggagcatggatatccgaaagaagcagttgaaaaatatcttcagttattcaaggagattacaaatgatatcgagggagtacgctactgcaaagaaaaattagagggataccttgaggaagcgactgcagatggactggagatgatcatcgcaagtgtggacagtgtgaaagaagcagattttaagttaagttttgacccgacactggtgcggggaatgtcttactataccggaacaatctttgagattgcgatggatgagttcggcggctctgtcggaggtggcggaagatatgatgagatgatcggaaagtttaccggacagccgacaccggcatgcggattttcaatcggatttgagcggatcgtcatgctgcttttagagagaggatatgagattccggacaacaaagagaagctggcgctcttgatcgagaaaggaatgccgcaggagaagatgctggaagtgctggcatttgcaaaagagcagcgtgctgcagggaagcaagtaatgctctcgatcatgaagaaaaacaaaaaattccagaaagaacaactttctcaggaaggttacacagaaattaaggaattttttaaataaatatggaggaaaagaacatggcagaatcaatgcagggcttaaagagaagccacagatgtgcagagttaagcaaagcaaatatcggtgagactgtgaccgtgatgggatgggtgcagaagaaccgtaataaaggaggaatcgttttcgtagatttaagagaccgctccggtctgctgcagatcatttttgaaaatggttccatcgatgaagccggatttgaaaaggcaggaaaattaagaagtgaatttgtaatcgcagtagtgggaactgtggaggcacgttctggtgcagtcaatgagaatcttgcaacaggagagatcgagattcgcgcaagagagatccggatcttatccgagtcagagacaccgccgtttccaatcgaggagaacagtaagacaaaggaagaacttcgtctgaaatatcgtttccttgacctgagaagaccggatcttcagagaaatctgatgatgagaagtaaggctgctacactgacacgtcagttccttgcagaagaaggattccttgagatcgagacaccgatgctgatcaagagtacaccggaaggtgcgagagactaccttgtaccaagccgtgtacacccagggaatttctacgcactgccgcagtcaccacagattttcaaacagcttctgatgtgttccggatatgatcgttattttcagattgtaaaatgtttccgtgacgaggatcttcgtgcagatcgtcagccggaatttacacagatcgatatggagctttctttcgtagacgtagatgatgtcatcgatgtcaatgaaagattgctggcaaaattatttaaagaaatcttaggtgtagaagtaagccttccgattccgcgcatgacatggcaggaggcgatggatcgctttggttccgataagccggatatccgctttggaatggaacttgtggacgtatctgaagtcgtaaaagactgtgagttcgtcgtatttaaaaatgcactggaaaacgggggaagtgtcagaggtatcaatgccaaagggcagggagcgatgccgcgtaagaagattgataaactggtagatttcgccaaagattttggtgcaaaagggcttgcttacattgcaatccaggaagacggtacggtgaaatcttcgttcgcaaaatttatgagcgaagaagagatgcacgcattgatcgaggcgatgggtggagagaacggagacttacttctctttgctgctgataagaataaagttgtatgggatgtgttaggaaatctgcgtctggagatcgcacgtcagttagagatccttgacaaaggagattacagattcctctgggtaacagaattcccgttattagagtggaacgaggaagccggaagatatacagcaatgcatcatccatttacaatgccgatggaagaagaccttgaccttcttgatacagatccgggaaaagtccgtgcaaaagcatacgatatcgtattaaacggaacggaactcggaggcggaagtgtccgtatcttcaatcaggagattcagaataagatgtttgaagtgcttggatttacaagagagcaggcagaagaacagtttgggttcctgttaagtgcattcaaatatggagtgccgccgcacgcaggattagcatacggacttgaccgtctgatcatgttgatggcaaaagaagacagcatccgtgacgtgatcgcgttcccgaaagtcaaagatgcctccgatctgatgacagaagcgccggcagcagttgacagaaaacagttagaagaacttggacttgagattgcaaaggtagaagagtagatcgtatttaaaattgcaaagaaaagagagcgctgtgaaatagggagaggattccttatttcgcagcgctctttttttgagtacaaatcagatttatgtgagcctatgaatgataaccaagctcttcttccagttttttctttgtctgtagcatcagcttggagagttccaggatacgctcatctgtcatgcggacggtcgggccggagatactgaaagcatattttggcttgccgctgtaatccatgatcgaggaggcaatgcagcgaacgccgttttcattttcttcattgtcaagtgcgtaaccattttcccgcgcttcttccaaaataataaatagttcatccagatcggtgacggtatactctgtcagtgcctcgatcttactgtcgccccagattgtacgcacttcctctggacgcatcatggcgagcagtgcttttccgacaccggaacgatacattggtgtgcggcttccgacacgggataccattcgcaccgagttagagctggattctaccttgtcgatgtacacgacgtccagtccgtcacgtttgacaagatggacggtctctccgctgatatctgcgagctcctttaaataagggtgaatggtagataacacatcaatatgccctaaaatccggctggaaatttcaagcagtttaaaagaaagggaatattttccactctcttcatcttgacgcacataatccatatacatgagtgaggttagaagtcggtgggtcgtgcttttatgtaaaccaagcgtattgctcagttcaatcagtccggtcggaccggacttggaaagttcttcaatgactgcaaacagtctgtctgcgacctgaatcggatttttttgttctgcagtctgagttgtagtttggttctcttttttatcgtacacaatcatttcctcctagaatctgtggactattgtaacattttatgaaaagagaagcaatcccctttccagattcagggagaacggaaggaggtttcgggtgatcggagaataaatcctgcatttgttggagaaaatcgaaagaaacatcttgactttcttacaagaagtagtataatgcaaataaagagtattgcattatgaaactgagtttcacaatgtgaaacgaaatgaaacgtagagagatccagtcaggaggaagttaaatgaacgaagtattagagaaaatccagaagatcggaatcgttccggttgttgtattaaacgatgcgaaagatgcagcaccacttgcaaaagcactttgtgatggtggacttccatgtgcagaagtaacattccgtacagatgcagcagaagagtctatcagaattatggcagagcagttcccgaacatgcttgtaggagcaggaaccgttctcacaacagatcaggtagaccgcgcagtggcagcaggagcaaaatttattgtcagccctggattgaatccaaagattgtaagatactgtgtagagaagaatatcccgatcacaccgggtacaacaaacccaagtgatatcgagcaggcaattgagtgcggactggaagttgtaaaattcttcccggcagaaccagcaggcggaatcgacatgatcaaagcgatggcagctccatacacaaacatgaaattcatgccgacaggtggaattaacgcgtctaacttaaaatcttacttagacttcccgaagatcatcgcatgcggcggaagctggatggtaaaaggagatcttgtagcagcaggtaaatttgatgagatcgaaaaactgacaagagaagcagtacagtctatgttaggatttgaacttgcacatgtaggaatcaatgcaaatagcgatgatgaagctggaaatacagcaagtgcatttgaaaagatgttcggattcacatccaaagaaggaaattcttcatactttgcaggaactggtgtagaagtaatgaagactccatacaaaggaacaaacggacacatcgcagtttccacaaactacatcgacagagcagtgagctatctggaaatgctgggatatgaattcgatatgtccacagcaaaatatgatgcaaagaacaatttaaaagcagtttacttcacaggagaagttggcggatttgcagtgcatttagtacagaaataagaaatgctcatagctgcacgacattgcagcgtatccgttagaagtttgtaatattgattatagaagataaaattacaatttatgattaagaggagattaaacatggcaaagaaagtaattacatttggagagattatgttaagacttgcaccggaaggatactaccgtttcgtacaggcagatacattcggagcaacatacggcggaggagaggcaaacgtagctgtttctcttgcaaactatggatttgatgcaaaatttgtaacaaaattaccggcacacgagattggacaggctgctgtaaactctcttagaaaatatggagtagacacatcttacatcacacgtggtggagacagagtaggtatctacttcttagagaagggtgcttcccagagaccttctaaagtaatctacgacagagcaggatcttctatcgcaacagctacaaaagaagatttcaactggaaagagatctttgacggagcagaatggttccactttacaggaattactccagcattaaatgatgaagtagcagcaatctgcttagaagcttgtaaagcagcaaaagagaatggagtgacaatctcttgtgacttaaactacagaaataaactttggtcaaaagaaaaagccggagaagtgatgggagaattatgtaaatacgttgacgtatgtatcgcaaacgaagaagatgcagcagacgtattcggaattcacgcagcaaacacagatgttacaactggtacagtaaaccacgaaggatacaaagatgtagcaaaacagttagcagatagatttggattcagcaaagtagcaatcacattaagagagtctatctcagcaaacgacaacaactggtctgcaatgttatatgatggaaatgactacttcttcagcaaaaaatataaaatgcacatcgttgaccgtgtaggtggcggagacagcttcggaggcggactgatcgcagcttccttaaacggatttgactcacaggcaacaatcgaatttgcagttgcagcttcctgcctgaaacactctatcgaaggagatatgaacttagtatctatggatgaagtgttaaaacttgcaggtggagacggttcaggccgtgtacaaagatagtatataatttatttttaattatataaacctgtatttgccagtacaggaaacgtccaaacagcttatacccatttgagctgtacctaaaattatttatatattttttaccgtagggaatacaggcagaggtgcattgtattccctattttcaaatcagagagaatcataattgcaaaatgaattaaaagaggtgtaccttatggaaacaaaaaaagaatttgatctgcttgcacttggagaattactgcttcggctgtccccgccgaacaatgagaggattgtgcgcggagagacccttcagaaacaggcgggtggcgcagaattaaatgtggtatctggtgtttcccttcttgggttacgtaccggaattatttctaagcttccggcaaatgacattggaacttatatcaaaaatcgagtgcgtttctgtggcgtcagcgatgactatttagtatatgacagcgagaaagatgcacgcctcggggtatactattatgaaaacggagcgtatccgcgaaaaccgggaatcgtctatgaccggatgtatacgtctatgacaaagattgatgtggaggattttgatgagagtctgttttcgtcagcaagatgtttccacacgaccggaatcacattggcactcagtgagaagacgcgtgaaactgcaatagagatgatcaaacggttcaaacaggcaggagcaatgatctcctttgatgtcaacttccgtggaaacttgtggacaggagaagaagcgcgggcgtgtatcgagagaattcttccatatgtggatgtatttttctgttctgaggagacggcgcggcttacgtttggaaaagaaggggatgtccggacgattatgaagagctttacggaggattacccgatttccatcgtagcctctacacagcggatcgtccacagcccgaaacgccacacattcggttcagtaatctacaatgcgaagacaaatgtttactatgaggaagagccttaccgagatatcgaagtcgttgaccggatcggaagcggggacgcctacatttcgggtgtgctgtacggattgcttgcacacaatggtgattgccagaaagcgctggaatatggaaatgctacaagttcggtgaaaaacacaataccgggagatctgccatcctccgacttaagagagattgaacgtattatccgagcacataagagtacgggaagacaaagtgagatggatcgataagaaagaaaaaatagaacatatcgttttatgcaagtgaaaagcatgaaacgatatgttttattgcttatatgaaaaaatactgcaaggtactatacttttggaaaatagtcttgtaatataggttcatacaagcatataaaaacaaatgagacatcagaatgtggaggcagcatggaaaagaattacgaagtgttaaagcattatcttcaaagtgaaaagcaagcaggaaatatgaagaagcgtcatagagtgccgcaaatgcatagagatgaagaccagattgtcatttcgtatccgaatgaagaggtatgcaaagagagagttgcaatccgtcaaaaatataaaaatgttccgattccaaatcacagacatgagtatatcgaactttcttttatgatggagggagaactttcaatgcagatagaaggaaagggaattcgaatgaaatcgggagatgtctgtctgatgaatcgaaatgtaagtcattcttcagagcgggcaacagatgatatttggatgtttaatatattaatgacagctgatttttttgataccatttttatgtatttgttttcagaagataaatacatttctaactatatcattaatagtctgtattcggaaagtaaaaagaaaaattacattttttatcatcttccggagggaagctttgaagaaaaggttatggaacaacttatttgcgagtattttctggaagaacaaaaaaatattggaaagatcaccgcatgcctgctcttactttttacggaaatatcgagagcagttggagcagaagatgaagcggtcatcacacagaaaagcatcaagattcaaaaagaggtaattgaatacttaaagaaaaattatcgaaatgcaactttgaattctgtggcaaaagagttgtgcttccaccctaattatcttagtgcgctgttgaaaatggaggggaatcgggggtttaaagatattttatttgacatacgtatggcagaagcatctaatttattatgcaaaacagataggaagatagaggagatttcatctgaaatcggatatgcgaatgaagggtatttttataaatgctttaaacaaaagtatggcgagtctccggataattaccgaaaaaagcataaaaatcttaataaaaaacagtaaaagctttattttctatatgaaaagaagggaggaaaagagatataatttttacctgagaaaagtatttggagggtaagatgagtacaaaagtaaaaaattcaaaaatggaagccacacgtgttattatgacaccacttggttccgcagcatcgaatgtattcaatatgttgaatatgtcgtttttccttgtgtttagtacagaagcacttgggttaaatattatgatcatggggcttgtaatgactgcgatgagaatctttgatgggattacagaccctgtcattggttcaatcattgacagaacagagacaagatttggtaagttcagaccattcttagtgatcggatcgctgattatgcttctggcaagctttatgatctatctgttttcatttgatattccacagtcatatcgtatggtatgggtaattctgtggtatgcggtatgggtaattggatatacatttatgacaacggtaaataaatgtgtattgtccatcgtaacaaaaaacccaaaatatcgtccgctttcaggcgtggcaggaggatgctattctacgctgcttagcttgattatgacaacggctattattccgattttacagaaaaatggtggactcggatcgcaaaaaggatggatgcttattatcatcagtgcgtttatcttacatgcaattcttttagtaggttgtttgtttgcgatttcaagttctgataagccggagttttacagacaagatcctaacaaaaaggaagagaagatcacaatcaaagacagtatcaatgtgcttcgtctgaatcagccgctgcgaatgttgatcttagctgcatccacagataagattgcgtcaacaatccagacttcagtcatgacatacttttatatttatgcggtaggaaacattgatttacagccgatcgtaggaggaatctctacgccgatgtcccttgtaggtgcatttgttgcaggttctgttgcagtaaaatttggatgtaagaaagcatctctgatcggagctgtggcaaacttgactttagaggctattttaattattttccgtccttttggagagggaacactgtttgtctttgtggcattgatggcattgaatatgctctttagaagattctctgctcaaaatgtagatccaatgatcgcagagatcatcgactatcacaaattaaaaacaggaaagtttatgccgggattcatcggtgctacattttcactggtagataaggtgatcagtgcatttggttcttcgattgtaggtatccttatgggacttgcaggatacagcgcaggagcagaaccgacaactacattgtatatcgcaacaatcgcaatgtaccttggagctccgctgttgggagatttggcgagtgtgatcgctctgaagcggtatcatattacggcagaagagtacaaagaaatgtatggagataaagcaattttaagtaaaaaagaagctaacaaataagaggtgaataggttgaaagaaattttattgaatgacaactggctttttcacaaagaaaatgaagtggaaggctgtgtgacattgcctcacacatacaatgctgtcgatggtcaatcaggaatttcgatgtggagaggaaaaggcttttacaaaaaagaggttcttttttcagaagaggacttaaaagaaaagattttcctggaaatcggcgcatctgcgatgaagagtactgtgtatatgaatggaaaaactatttgtcacaatacttgtccatacgcaatgtacagaattgcgttgaatgagcacatcattgttggaaaaaatttgttagaaattgtaacagacaatacggcgacggatgaagtgtatccgcagatggcagatttctcgttctatggaggcgtctatcgggatgtaaaattagtgttcgtgccacaacagcttcattttgactacttagatggcagcagagatggtgtgcaagtcagaacacagaagttggatggacaaaagtgggaagttacagtaaccggttgtgtgatcaacgaaggaaaagattgcgaaggggaagtgaaagtatctgttttagataggcagggagtagtctttgaaaagactcttagcatgtatttctctgagaaacaggcatttacgatccggacagaaatagatcatccgcatttatggatgggagtagaagatccgtatttatatcaagtacaggttgaaatctgcacaaaagatggagtggaagaaacacgcagtattgcaacaggattccgtgaaatcacgattgatccggagaaaggaatgtttttaaacggaaagcacatcaagattcgcggggttgcccgtcatcaagattttggcggtgtgggaaatgcagtttccaaagagcaaatggaagaagatctttctcttgtaaaagaagtgggagcaaattccgttcgtctttcacattatcagcacgatgattatttttatcgccgctgcgatgaagaaggaattcttgtatgggcagaagtaccattcatcagtattttatcagaaagcgaaaaagcagatgaaaatatcagacagcagatggaacgtttgatcaaacagtgcggaaatcacatctcgatttattgctggggtgtgcaaaacgagattacaattgcaggagagacggcggagatccacgaaaaggtaaaagcgatggcagcgtatacaaagcagttagatccgagcagatatacagcagaggcaaacatctattccgtggcaaatgaaagtcctttgaatcgaatggcagatttagttgggtataatctgtactatggatggtattatgataaaatgacagggctacagcagcgtctggatgagttccatatggcctgtccggatgttccgttgcttgtgacagaatatggtgtagataccaatccaggctatcactcttatgaaccgaagacgaaagattattcggaagagtatcagttgttgttctcggaaaatgcgctgaaagcttttgaagagcgggattactttgtcggaagttatgtttggaatctgtgtgattttggaagcgccaaccgtgatgaaggcggaaagcagggacaaaatcagaagggacttgtgacgattgaccgaaagatcaagaaagatgcatattacttatataaagcaaactggtcaaaagaaagctttgtaaaattagctggcagcagatttgtgaatcgtcatcaggaagagaatacaattacagtattgtccaatcttaaaaagcttgaagtatatgtcaatggaatgcttgctggtgtgaaagagcagccggaaccaatgacgaatttcacggtagtacttccgatgggagaaaacaaaattactgtaaaagggtttgaccaagcagagacagtatatgaagatgagatggtgcttcatcgagtgacagagccggataagagctatgaatatgtacagaaagatcaaggtggaaatgtcattaactggtttgaaaaatttgacttggaagatgctggtacagaggagattgcattggatacggagtgctattctagtatggataagcttggagagattatgaagcatccaaaaggtgaagcgattattttgaaatattttggagaaatggtagatcaccctaaatttgcaatgatgaaagtaatgacattagatgcgatgagcaaattaaagaatttgggaattccgaaagaattaattcttgtcattaaccgcgaattgcagcagataaaaaaataagtaaaaaagaaaaataggaaatgccagacagaaagtctttatgagagaagctcatttggaattactgcctggcatttttgttagaaatatcgtatgtctgttctgtaaaaggggaattggggataccaaaatccagaaatcaaatggtttgcttacaaaagttgtatagattaaaaatgtgcaggcaatccctcgggatgtttctgattgcggatcagcttggaatctgctatgataatctcatagaattcctctgtcaaatggaggagtatcatgaggagaaaacatcgtttaaaggaacttacaatcaaagataatttcatgtttggtgcagtgatgatggatgaagaaaactgcaaaggtcttttggaaagagtgctggagataccaattgaacgggtggaagtcagcagggaaaagagtattgtatatcatccggaatacaagggtgtccgattggatgtatacgcgaaggatgagcatcaaagtcactataatgtggaaatgcaggtggaacggaaagcggctcttggaaaaaggagccggtactatcagagtcagatggatatggaactattattgtcaggggaagattattcagaacttccaaacacttatgtcatttttatctgtgattttgatccgtttggagaagaaaaataccgctatgtatttgagatgcaatgcaaagaatctaagcatactaatctggaagatggaaggaccattttatttttgaacacgcatggaaagaatgaaagtgaagttccgaaagaactggtaacatttctaagatatgtaaaggcagaccttgcggaaagtgaggaagcatttgatgatccgtatgtggaacagctgcagaaattcattcggaaggtcaagagaagtagggaaatggaggagcgctttatgatttttgaagagatgttaaaagaagagcatgcgcaaggtcttgaggagggtcgtagagaaggtcttgtagagggatgtgtaagtacactgaaagagacattgcttctgtttttaaaaaaattcggagaagttccaaatgaaatttctgagcagattcagttacagcaagagacagaagtattgaaacattggatgaagatagcctttcagtcagaaacattggatgaattcatacaaaagatgtaagaaaatctatttctgatcgatgatcagatctgaaactctggaagttttactgttcttgtaaaatttccggggatatgaaacaagtcgatgccatttcaggcaataattcaaaaatagacaggggaattctatatttgaaagtatcagattcatcaattaagaattgaagaagattaagaaaatagaaaatgccagtcagaaaatctttatgagagaagctcatttggaattactgcctggcatttttggatctttgttaagaggtggagtgaaatatttttggaaatataggaggcttatcctgtaaggagaaattgggaagattcctcttgaaaagctaggtagccaatcgtgatgaaattctataaagtttcatctgattctttctgaagcatacagccgtgtctgaaaatgtttgcaagaatcagtgcgatacatccggcaagaatccatgaaaatcgtaatggattgttgaaataaaatgtttgatacgcgattcgaaatacaatcatctgtaacagaaactggctgaaaataccgagaaatagcatactgtatgcaatccggttgatatagaatataatttccggaaagaaaggggttgaagttatctttaatttccggaaaattttctgaaactgtacacagatcagaagcttgggcaggtattctagaagaatatccaggatagtcagagggataccaagtaactgtacagaagtattcatataatttggtggaagatagctttcagaaagcctcaaaaaaccgaaaagaagctgaatctttatgccgtttccggtatcaatcacggagatactgtctgctggtgaacagcagaggaaaatagtattacagacagaacatgcaatcataaaaaataagtaaagcgtatagaggaagagaatccacttgcaaagagcaaggggctgctggacctgatcatttgactgtgggtgagaaagggaatccgatattgccttcatagaaagacctcctttaataaggtaaaaaagtaccgtttgctagtattatctttgtaaaaatattatagcaagggtatatacatatatcaataataaattaatgataaacattaaaaatgcagtcgtaaagaaaaagacaacagaataggaaaataccagggaggagatcttagtgagaggaattcagttcgatgtcccggtattttctggttacgtcttattgtatagaaaattcctttttaggggaaatttttgtggatatttcttattgtttaatatcctaaatcttctccaatcaaaatgaccttgatacgaccggtatgtctggagtgccttgtgacaacgacctgacagcacatacagtccgcagaatggcagtctgcacatgtgcctgttactttacaaggtgtgtttgtctgaagtcttgcagcatttgcaggagtagcaatattttgaacgcgtgcgattccagatggaacatctgtgacaattttattcattcctgcaaggatgataacatgctctggtccgtgaatcagacaggcaagtcgatttccgtttccgtcgatattgatcagctcaccgtcaatggtaatggcattggaactcataaagaagaaatcagaagctgcactttttaagtaaacttcttttcgctcttgcggagtgcgggcgagccctcggtcaatgagtgtgatatctgcttcgcggagcgcctggagcataccgctctcttctagtgtgacagacccgccaaagcttactgaagattttgctgggataaaagaaagagcttgctgaacggcttcagaagcagtcggacagtagtacccctccatatttcgtttcgccagtttttgaatgatcgtattggccaacgctgcgcgtgcctgttgttttggtgttgtatcagttggatgtgtcataaagaatacccccttataaaagtgtgtggtcaaagtactgcaaaatgaaagctgttatttcttttgcagtagccttattttttgtattatcataccgcagtttttttgcatgggcaagagaaaatcgaaaagcaaactagtttagtgagcgtgcacgcttaaaaaatttgtgcatgcaatacgaaaaagctctcgcataggtgatgatagaataagaaaattgtgaataataacgaaaaaatacagaatattaattaaaagtagataaaaaaactgaaatatagtatgataaaaaaaagaatacctaaatctcaagtgcaagcgagcattcacttctatgtaattgcaacatctggaagtgatgcggtacatggattcggaaggaggggattttatgaagacaatcaaaaaatggatggcatattttatggcagttctgatgttatgcagtatgtctcaggtgcgagtattagcggaagatgccttgccgacagcggacactcctaagattacagaatttaagattcagggagtaaaaggaacggtggatgatcaacagcagaaaattaatgtggcagggcttccgtgtaatacagatcttacaagtcttaccgcagaggttacctgtgatccggcagatgctatagtacggtttgatccgttgaagccgtcagcagatgatgggcagaagaagctggagcagggaaatgcattgcaaacagaagacttttcagtaccgagaatatgtaacgtagagtatcagggacaaataaattcttatacagtgacagtgagtaccctttcgcatgcgggagatccagcgacttgtacaaacgattccgtatgtaaaacatgtggaatgttactggaagaaaaatgggggcatgatcttttagcggcaacttgtaccgaaaaagcaaaatgtcagaggagtggttgtagttatacagaacctgcccttggacatgatctctctaaggcgacttgtaccgaaccggcaagatgtcagagagaaggctgtgactatacagaaggcgaagcgcttggacatgatctttctaaggcgacttgtacggaactggcaagatgccagagagaaggctgtgactatgcagaaggcgaggctcttggtcataatctatctaaggcaacctgtacggagcctgcaagatgtcagagagaaggctgtgactatgcagaaggtgaggctcttggtcatgatctatctaaggcgacttgtacggaacctgcaagatgtcagagagaaggctgtgactatacagaaggtgaggctctcggacatgatctctctaaggcaacctgtacggaaccagcaaggtgtcagagagaaggctgcgactacacagaaggaaaagcccttggtcatgatatttctaaggcaacttgtacagaggcagcaaaatgtcagagggaaggttgtcattatacagagggaaagccgcttggacatggtatgaatgcctggactgttacaaagaaaagtacaacgacagagaagggagaacgggcacgaaattgtaagcgatgcgactatcgagagactgaacttatagaacgactgagtcggaaggcagatgccgggaaaaaccagattgcagatttaaggacagatattaattatcctttggatgagacgatcacatttcatctttacggagctggacaggataatacagaaccggtagaaggcgataccagatacgttccggagagctggaagattgaaaatcagtttgactggagagagactgatggagaatctggatttcaaatacacaaggcaggattttataaggtgatggcatctttccggcaacagaagtttgaaagtggaacgtggcagaatacggatcagacagatataaaagaagtgacgatcaaagcgggaacagaggcgcagcgggaagaacaggcaagaaaggatgcagcaaagaaagcggcgaagacgggagatacgagccagatgtttgtttatattcttcttctgcttgtggcagcaggacttgcagtatttgtgattgttcgaaataagaagaaacaacaataagccattggatggagaagtgttgaaaacagataatatttgaaatttgaaaagggaggctgtttgtaacagtctctcttttttgaaatgcgggaatcttcgtagatgggattcaaaagaaattttcgatgtacctatgttacatagacaacaaaaaactttacagtaacctgtaaagcttctgaagagcacgagacgggattcgaacccgcgaccctcgccttggcaaggcgatactccaccactgagccactcgtgcatgttgttttgttgtttgtgttcccttgaacaatacatactatacaggataaaaagggatttgtcaacagaaaaattgaaaaaatttattttttttaatttttctgtaatttaccatcaattacgaacaaggtattctcgcaatggagtggagggtgagttggataaatagaatcgaatatggtaaatatcggtgtgaaggtcataattgatttctttttgtttgcagagaatggagtcttttaaaagagcgagtctttgttccgaatagtctttggggatagagacatcgattgtaagctcagaaagattatagcactctgaacgatgttgtctgatgatatgataggttggatgaagataattccaaatgattccgaaaagaaccagaaggagaagaagtcgaaatgattttttgcctttcaaagatttacaccccctgcatatataatatatcctataaataacacacctgtcaaatctatagcttatttatttaggattacttggatataataacagtcagataagtacagggagtgaatcgaaatggaagatgtaggatatttaaaagtcaaaattgaggagttgctgaaagagagaaatatttctaaaaataaaatctgttttgatctgcggatacagagaacacagttgaaccgttactgtaaaggagatgtacagaggctggatgtaaatcttttatgcagaatctgtgattatacgaattgtaggattcaggatgtgatcgaatatattccaaggacagagaaggtgctggaggaagatggagaagatacagtacactagaaggaattgtgaaatggcaggtgagtagagggaaaaatttttctgaacagatgccaaatagaagggaaagctggtaggaatcaatagcaaaacagaagttttgctatattgtgtctctaccagctttcctttttatcagataagaaatttatttgaaaccattcttagttccaagcatctgtgtcagtcagattgagactagatgcttgaaagacagggtctttgccctgctttttttgtgcacggtaatcgtcaagcacgcggaatgcaatatttccaagaagcaggatagcaaaaatattgacgagagccataagtcccatcagaacatcggcgagattccacacagttgaaaaatttgcctgtgcgccgaaaaagatggcaatgaggcaggtgatacggaaaagattcaaaagaacaggactgtttttgataaacagaatgttggcttctgcataatagtagtttccgacaaggcttgtgaatgcgaaagcaaaaatggagaaggtaataaagtggattccccatgttcctacactgctctgcagggctgcctgtacatatggaatgccgtctaatgttcccggaactcctttgacattggaaagcagcaggatgaaagcagttgtggtgcagatcagaagtgtgtcgataaacacagacaagatctgtacgagtccctgcttgactgggtgagaaacagcggcagaagcagaagcatttggcgcacttcccatcccagcttcatttgagaataatccccgtttaataccgatcaacacagtgctgccagcaaaacctccgatgattgactcgatatcaaaagcttcggaaagaatcgtttgaaacatttccggaacggacgacaggtttgttacagttacataaactcctacaagaatataaattcccgccatgatcggaacaagcacagaagtaatgaaactaatccggtgaactccaccgaaaatgacaactgccgtaagcagggcaagaactgctccgacaactgccggaagcattgtgttggaatagtctttgacatagtattcgaaggaggaagaaatattataagcctggagtccattgaatccataggcaaagcaacagatcaaaaggacagaaaagaggacgcccagccagcgcttttttaatgcgcgctcaatgtaataggaaggtcctccgcggaaagaatctccgtcttttactttatatacctgtgcaagcgtactttccacaaatgcagaagctccgccgatcactgccatgatccacatccagaaaatggctccgggaccacctgctgcaagtgcagttgcgattccggcaatatttccggttccgactctcgaggccgtagaaatcatcagagcctgaaaggaagatactggttttccggaggcattttctccgtcagaagatttttctttcagtgcaaggaatgcatcttttaaaagtgtgagctggacaaaccgtgtccggatagaaaaatagattccggcgcccactaacagaaaaattagaatatagctgtacagaaaatcatttacatgtgataaaaaattgttcatagtcatctcctttgttctagaatgtcgcagagtactgcgtatcaaagtatggacattcttttataaaatagcatttccagtaaaaatatatttagtaatattgcttggaaggcaatgatctgaaaaataagaaatacgctctagaagtttaatataaaaatttttcaaagtcaatataagaatcagaatcctggaaaaagaaaacaaagaaagtattgcatcaggaaaatggatatggtagaattggagcgaaaataaatatagaaaaagcagagtagagatgtgtgcgttaagtgccagacggacggggagttgccggctggacgaagagcagaagtagcttgcggtacatatttcgcatcccgctgctgcacatagaaatgatatgtgaataccttctatgcgtggcttctggactactgcaaaggaggtattttttatgaaacaaatgaaacaacagtttgtagactcatggcatgagttaagacacttgaagacagtcgttgtgacagcgatgctgattgcggttggaattattctgggatatttttccatcacagtgaccccgtatctgagaatcggattttcgtttattgcaaacgaattgacagcacttctttttgggccggtggtcggtggtgtcatgggcggaattgcagatattatcaaatatctcatcaagccagacgggccatatttttttggatttacactgagcgcaattttaggtcctgtgatctatggaatcatgctctataagaaaccgctgagttttccgaggatttttatagctaaagtgcttgtcgcagttttcgtgaatcttcttcttggaacttactggctgtctatgctttatggaaaaggatttcttgcattgcttccggcaagagcgctcaagcaggtgtgctcggttccagtagaagcggcattgttttatatcatcgtaaagacattggggaaagcacactttttctctgaggttcgtgcaaagcgataacgtatagtgttagaaaagcagtcagtcattgcggcgggctgcttttcctgttccatattttggagagactaaatccaatccaaaagggataaaattgtgaaaagggatagagactaaaaaagatatcaacaagtatttcggggcaaaggtgtaaaaggggagaaatcatggaggcggaagtagttcgatatcttctgaaagaggagaaaggaaaacgtgcagtgcttgcaagactggtattgtactgtgcgccatttttaaagcgattgaagatttcagccatgatctggatgccggaagaacttttagaagaactggaaacgcttatagacgagatggggattttgtgtgagaggatggatcaaaagtcagggaaagttttgatctttctttatcgggaagaaacactttgcagatatctgatgcgggaaagtcaggaagcatttcttttgaattgtggttatcaaaaaggaaatctgaaagggaagatcaggcggtttgcggagcgtatttctattgaaaaagagaaggggagatttccacaggaggcggggatttttcttggctactcttttgaggatgtggaaggatttgccggcatttccggaaaagaatgcatgatgactgggtattggaaagtgtatgggcacagagcagaaaaagaaatgctgttcatgatttatgatcaggtgaaaatgtgggctgtcaatgaatttctggcaggaaaaacagcgggagaaatctgtcgctaaagcgaatcaggagcaaagcgcaggatagaaagtgttggatttcgtttcaattcatgttacaatacgaaagaggttctgcaagaagatttcaggcggtcgaaagtgaaaaatagattctaacatagaagaaaaagagaaagaagaaggtggaaatatgagttatgcagataaagtgtttatagaaatgtgccgtgatattattgataatggaacaagcacagaaggagaaaaagtgcgaccaaagtgggaagacgggagttatgcgtatacgatcaagaagtttggagtagtaaatcgctatgatctgtcaaaggaattcccggcactgacactccgccggacaggaatcaagagttgtgtagatgagatgctctggatttggcagaaaaaatcaaataatatccatgacttgaattctcacatatgggatagttgggcagatgaggatggttcgatcgggaaagcttatgggtatcagatgcaggtaaagcatcagtaccgggaaggaatgatggatcaagtagatcgtgtaatctatgatctgaaaaataatccttacagcagaagaattatgacaaatatttatgtacatcaagatcttcatgagatgaatctttatccatgtgcatacagcatgacttttaatgtgacgaagcgagaagacagtgagaaacttgtgctaaatggaattttaaatcagcgatcccaggatgtattggcggcaaacaactggaatgtctgccagtatgcagtacttctgcatatgttggctcaggtatgtgatatgcaagtgggagagtttgttcatgtaattgcagatgcacatatctatgacagacacattcctttgattgaggaactgatcaaacgagaaccacttccggctccgaaattttggctgaatccggacattaaggatttctatgcatttacaccggaggatgtgcgtttagatgattatcagactggaccacagattaaaaatatcccgatcgctgtgtagagagttaaagtcatacagtatatggatcgtgtaatcagaacaaaaacagagttttggaggaagaaagatgaatattattgttgcagtagacaaaaactgggcaatcggaaaagataacaagcttcttgtcagcattccatctgatatgaagtttttccgggagacgacaaccgggaaagtggttgtcatgggaagaaagacattagaaagttttccgggcggacagccgttgaagaagcggacgaatattgtgctgacttctgatagaaattataaggtaaaagatgcgattgtcgtgcacactgtggaagagttgctgcagacactgaaagcatataaacaggaagatatctatgtgattggtggagagagtgtgtacagacaactgctgccttactgtgatacagcacatatcacaaaaattgatcatgtctatgaggcagatacttattttccgaatctggatacggatgaggaatgggagattacaggaatcagcgaagaacagacttattttgatctggaatatgaatttgtaaaatacgagagaaaataaaaaataaaatcggctgccgtggatggcacagaagtaaatctgtgaaaatctgcggcagcctttttgttcaggagaaaggagtgtaagtgactgtcaggatctatcggaaatttccgaagtgtgttcctggatttgtctgacatattctttgggagtcattccgaattcttttttgaatgcacggaacaagtgattgtagtttccgagtccgcagattttgtaaatctcgatcatcgggtagcctttttccagcagccgtttacaaagatccagtttggatttgacgatgtagcggtggacagtcatcccggtctgccgtttgaattcccggcagatgtggtatttactgatgtaaaattccttttccagtcggtccagggagatttcttcgtgcagatgatgcttgatgaaaatgaaaatatcatcgagagaaaggcgggggcgcacttttgtgtttgtctggaattctgtacggatgcaggcgcgcaggacaagcacgatcagcattgtgagaatgctgtcttcaaagagccggtggccgaaatctgtctgttcctgagggagagtcaggagctttttggatagatttttgatcaacatagtaatctctgaagaagagtggacacaagtacactcatacggtacgacatgaaaacaggattccagatcagtattctcatcggagagacgggtgagaagttcacttgtaaatccgacttgaagaaatttcagagggattttcgatggtgtatattctaagagaaaagtagtatttgggtttacaagcaggatgtcttcggtggcacataaaaaagtctggtgatcataggtgtagctgcattttccggatgtgacaaataaaatcatataaaaattaccggaggaaaaggttttctttttcgcattggtgtatacatattcttttgcaaagtattcttcacgcatcagttatctcctaaaatttgtattcaaaatacacaaaaaatgaaacttatttttatctataatgactaatatagataatatatcaatttttgaatattttcaagcaaaaaatggatatgttttcttatttcagaaagctataatactttctaacgacagcgttctgtcaaagaaataacaaagatacaataagaaaacatgcgaggaggaaattattgtgagagagttttccatgaaagacaaaattggctacaccctcggggatttggggtgctgctgtaccgagcagttcagagcaatgtttttgacagtgttctacacgcttgtactgaaagtaaatcctgtccatgttggaatcatcctgctgatcacaaaaatctgggatgcaatcaatgacccgatcatcggtgcgatcattgactcaagaaagtcgacaaagggcggaagatttattccgtggatcaaagcattctgtgttccgatgggtgtgctgtgtgtgattggatttttagatgtcagcagctgggactataaattcaagttggcatatattttgatcacctatattctttatgaggcgatgtatacttgtgtaaatgttccgtttggttcactttccagtgtcatgacagatgatgtcaatcaccggacagatttatcccgttacagaagccttggcggaacgatttttatgactgtgatcgtaattgtagggccgcttgtactttataaggacaataagccagttgcgtccagattcactctgatggcacttctctgtgcgacaatcggtgtgttctgcctgatcgtgacaagctcctggtgtaaggaacgtatcgaatggaaggtgcaggaaggcaagaaattcaactatttagatgcgctgaaaaatgttatcaagaacagagcattgcttggactgatcttttcaagccttgcaggaatgattgcagcaagtgttgtaaatggattgaatacttacttatttaaagattatttcggagatgtgaaagtaatgtcaatctctggtatgttaaatactgtgtatgcaatcatcacatttatcggaacaaaatatgtttccaagaagcttgggaaaaaagaatggtgtatgtacggagcaggatttgcagcacttgtctttggtattttattctttgtaccggtgaaaaatccacttgtatttattgcgatcaacggaatctgttatctcggagcaagtggttttcaggtgctgatctgggcaatggtaaatgacgcgatcgattatcaggagttgatgacaggagaaagaaatgaaggtatggtatactctacttactctttcttccggaagctgtcatcggcagtcagtgcaagtcttagcagctttacacttgcaatgatcggatataatgtaaatgaagtagtacagacagcggcagtaaaagcaaatatatggaaatcttacaccgcaatctatgcagtgggatatttgatcgcagtattgattttattctttgtatatccattgtcaaagaaaaagacagaacaaatgttagaagagcttgcaaaaagaagagcaaagggaaaaggaggcagataaatggtccgttatattgaagttgaaaatagaaaaggaaaaattctccgtggatttttaaatcttccggacggagtagcgcatccgccggttgtcttaaatctacatggatttggaggaagtctgtccggatacaaatatgcacatacacatttggctagaacactggaggtggagggaatcgcatgtatgcgatttgacttctacggatgtggggaaagtgacggagagtttgatgagatgacatttaccgggctgcttgaggatgcggaggatgtctatgcatggctgaaaagtcagtcatgcgtagacggggagaaaattattttatccggtcagagtatggggggatttgtggcggcaagtgcggctccacgtattcagccgtacggtttggttctgatgtgtccgggagcaggaatgtggtatggatgcaaagagcgcgcagattactttaagaatctcggaatgactttcgcagatatggaaggactgagattcggtctggagtttaactatgaccttgcaaagtattcaccatttgaagacgcaaaaggatatgagggcagtgtgctgatcctgcgcggaacaaaagatgaacttgtcgatgataaaacttgtgaaacatatatggaatgttataccggagcgaaaaaattcgtgaagatcgaaggcggcaatcataattttgcaagtattccggcaagagaagcgtgtgaggcagaaattgtaaattatgtaaaagagattatctgatttcagaaaggcaggagaacaagatgaaattattagagagcattcaagtagggaatacaacactgaaaaacagaattatgtttccacctctgacgacaggatatgaggcaaaggatggaagtattactccgcagagtcaggcgttttatgagagacttgcggagggcggagtatcgtatatcgttctcggagatgtggcgccgatcaagacgtttacaccggttccaaagttatgtgaggacagtcagatcgaaagtttccgtaagctggcagatgcagtgcataaacatggtgccaagatcggagtacagattttccatccagaatatgatacagcaagcattacagaactgttcttaaaaggagattttgaaggactccgcgcaaaaatgaaacatgatatgatgcatttcatcgatgaggtatcagaagaaagcctgcaggagatcataaaaaaaatgtgtgaatgtgcaaagcgggcacagacagccggaatcgatgccatccaggtgcatggagaccgtctggtcggagcactttccagcacaattttaaaccacagaacagataagtatggtggaagtcttgagaaccgtacaagatttgccatcgagcttgtgacagcgctcagaaaagcagttccagatatgatcattgattacaagttggctgttgttactccacagagaggaaagggcggagtgatcgcagaggaagcggttatatttgcaaaatggcttgaggaagccggagtagatatgctccatgtggcacaggcaaatcatactgggaatatggcagataccattccaccgatgggtgttcagccatatgcattctttgctgacattgcaggaaaagtgaaagaacaggtcaacattccagtcagcactgttggaagaatcgtaagtccggcgcttgcagagagtatcctggaaagtggaaaggcagatattatcggactgggtagaccgcttcttgcagatccggattggggcaaaaagctggaagaaggtaatggagatcagatccgccagtgcatcatgtgcaacaaaggatgtacagaccggatccagaacagacaattcttaagctgtattttaaatgcagaaaacggatatgaattagagagaaagatcacacctgcagagacaccaaagaaagttgttgtagtcggcggaggcccggcaggactggaagctgcgagagttgcggcattaaaaggacatcaggtgaccctgtttgaagagaagacagttctcggaggacagattcagatcgctaaagttccgccgagaaaagaagagctggaacgtgcgcttgtttacctgacaaatgcagtaaaagaggccggtgtggaaattttctgtggaaagaaagtgacagaggatgatctgcttgcttatggagcagatgcagtgatcgttgcgaccggagcttctaacatgatgctcccaatcccaggggcagaccgcacacgcgtatgcagtgcatgggatgtgctggaaggaactgcacaggtatatggaagagcagctgtgatcggtggtggaatggtaggatgtgaaaccgcagaatatctggcagagagagggtgtgaagtaagtatcatcgaaatgctggataagattgcaaacggagagagcagtacaattcttcctactttgatggaaaattttgaaaaaaatcacgttgctcagtatgtatctcataaagtagagagtatcggagagaagtcagtcgtatgtaagacaggagatgatgagacgaaagaaatcccttatgattttgttgtgatggcagtaggagcaaaagcaaatacatttgagacggagaaattagagaaagcaggcattgcagtgacaaagatcggagactgcaaagaccgtgcatcggatatcgaaaatgcaataaaatcaggatacgatgcggcaaatacgattgcataggagaaaatatagatttatccaaagatgaaagcgtagaagtggataaaacgagaagaaaagtaagaaagccagtgatggtaaacagagaagaaacctctgcctgccattgccggcttttttgttggaatataataagatagaaaaacagttgctttcttccacgtttgtggtaaaattgtcacgatatgcaaatgagagaataggaaggaataacgaagatgaaaaaaagtgtaaatctactggagggatcgattttcccatcactgaccaagcttgctcttccaatcatggcgacatctcttgtacagatggcgtataatatgacggatatgatctggattggaagaatcagcagtgatgcggtggcagcggtcggcgcagcgggaatgtatatgtggctcgccaatgggcttgcaacacttgcgaaaatgggcgggcaggtaaaggttgcacacgcaatcggagcgaaagattatgaggaagcgacggtatttacaaagagcgcactgcagcttggaattttatttggaatcatttatgggttggcagcggtactttttgcaggacctctgatcagttttttccatttgaatagtccgcaggtcgttgcggatgcgaggatttatctccaagtgacttgcgggggagtgatcttttcctttttaaatcagatatttaccgggatcatgactgctatgggaaatagcaggatttcttttatggcaactgcagtaggacttttgatcaacattgttttagatccactgttgatttttggagccggaccgattcctaaaatgggggtgctcggagcggctgtggctacggttcttgcccagacagttgtgacagcaatgtttctgtgggcagcatttcatgaggagacagtctttcagaaagtgaggattttatccgggatccatagagagcatatgttgcttctgatcaaaattggtctgccaagtgcagtacagagtatgatatttacagggatctcgatgatcattgcacgtttgattgcgggatttggggattccgctgtggcagtgcagaaagtcggatcgcagattgagtccatctcctggatgaccgcagaaggatttgcagccgcagtcaattcgtttgtagcgcagaactatggagcagacaatatcaaacgtgtaaagaagggataccggattgcaatgggagttgtcactgtttgggggattttctgtacgattcttctgatcggatgtccagaggtgatcttccgaatttttatcccagatgacaagattttgccgatgggagttgattatctaagaattttagggtattcacagttgtttatgtgtgcggaaattacgactgggggcgcttttgcggggattgggaagacattgccgccatctattgtcagtgtaatcctgactactgcaagaattccgatggcgatgctcttgactgcaactgcacttggattaaatggaatctggtggagcattacaatctcaagcattttaaaaggaatttgtctgttggtagggttccttatttatatgaagagattgaaaccacgaaaaatgttattgggaagtcaatagtaaagaggtgtaaaatgccatcatgaaatgcagcggcagatcgtgatggcaaataagaaacattaattcagatggaatacctgtgtggcaatcgaaaaatagataatgatcgagcaggtatctacaagtgttgtgatcagaggtgcagccatgattgctggatctaagtgaactttcttagcagcaagcggaagcacacagccgatcaatttggataaaatcacggttgcgattagggaaaggccgatgacaacagcaagtttcatgtcgtggtagacaaggaaaatccgaagtccatttgcaaaggcgaggacgacactgacgatcagtgcaatccggaattctttgaagatgactttgaaaatgtcccggaaacgtatttcattcagcgccagaccgcggataatcagtgtagaactctgggaaccacagtttccgccggtatccatcagcattggaatgaaggagacaaggagcgggattgcggagaaggcatcctcgtatcttgtgatgatggcgcctgtaatggaggcggagagcatcaggacaaggagccacacgatacggtttttggcgtgagaaaatacggaagtttcaaagtaagatttctcacttgggttcattgccgccatgatcgtgatatcttcggtagcctcttccaccatgacatccatcgcatcatcgactgtgacaatcccgaccatcagaccgccggtgtcaaggatcggaattgcaagcagtccatatttggaaaacagttgggcaacttcctcctggtctgtgtgagtggtagcggaaataatctcggtctccatgatttcggagatgacagtatcgtcattcatcgtcatcaagtctttggcagagacgattccaatcaactttctgcgctccagaacatagcaggtatagatggtttctttgtggatgccgacctgtttgatgtgtgccatagcctctttgacagtcatggactggtggagggagacatattcggttgtcataatgctgccggcgctgtcctcaggataattcaacagaagattaatgctgtttctcttgctgctgtccactgcattgagaatgcgggtgacaagattggccggaagctcttcgagaagatccacagtatcatccatatatagatcgtcgaggatttctttcaattctttttcggtaaacatttctacaaggtttgtctgcattgtattagacatattggaaaacacatcagcagccttgtcttttgggatcagacgaaaggcaatcgcaagttctttttcgttgagctcttctaataaaagagcgatatcgaccacattcattacatctaaaatactatggacggctttgaaatcacctttgattagaagttctgtaaaaattttagcattcataaatatacacccctttctggaagttgatagaaattcagtaaaaacaagaaagtatatgaaataaaaaaatctccgacatgcctgaaagatgtcgaagatggaaatacaaatataccctatatttctgtctgaaaggacaatcgttcaagctttagcatcatagggcgtaaaaattgcattaggttatgccttattacgacatagcctgctaaccaactaattgtgtctccacaattttgcggcagcaatcttaggaaaatccaaatccctatggtagcctcacctaccgaatttctcatattttttgttcggtttcattgtagttgattatgattataatgtcaagaaaaaaatattgagaaaatttttctagaaatttttgaaatggagctgctttttttcgtgtatttaaaaccgagatatgatatgatatttgtagtaatgaattttagaaaggagcatgttatgtatcattatatgtatcattatggaagtccggcagggatggttttgccaactgtttatttgcttatattcgcaggtgccctttttgtggcggcagtagaatacatttttcttggaatgggcttgtatcgtatggcggcaaatagaaaccatccttctccgtggatggcatttgttccatttgcaagaacttatttaagaggtgagttgtcaggagatatttatctgaagaaacactctgtgaaaaatccgggactcttgcttgtgcttatgccgattgcttacagcgtcattgtcagctgcctgcttctggtgtgttttatgttcgcgatatttggtgcgagtgtgatgataaacggaggtgttgaggcagtcgtttcggtgctgttatttgccttcgctataccggttctggtcatttcgattgtttatcaagcggtgatgagtgtgttgaatgtactggtggattatcagatttacagccggtatatgccactgcatcttgcagtaatccatgcggttttaggtatttttgtgccgctttacagaggaatctacctgttttatatcagaaaaacaccgtgttatggaatggggcagcagagaacggacaggcaggaacgcgcacagacagttgtaaaggatgctgtgcagaaagaggcgcaggcaaatgcggatgtgcctgcgggaaatacagaggtcccttcagaagagcagtctgtcgaaaaaaatgaggctgcttgtggcgaaggcgctggaaaggaagaaaagtaattggaagcgtatacaagttttgcgtcagtctatgatatctttatggataatattccatatgaagagtgggcagaatatctgtcaaggttgttggccgagtatgaagtgacagatggaattgtattagatcttggatgtggaaccggaactctgacagaactgatggctgcgcgtggatttgacatgatcggtgtggattattcggaggagatgctggaaatcgcgatggagaagcgggcagaatctggaagggatattttgtatctgcttcaggatatgagggagtttgaattgtatgggactgtccgtgcagtgatcagtatctgtgactctcttaactatattacagaggaagcggagttggaagaagttttcaggcttgtcaataattatctagatccggaaggtgtatttatatttgattttaatacggtatataaataccgggagatcctgggagatcagacaatcgcggagagccgggaagactgtagctttatctgggacaattattattatgaagaggagcagatcaatgaatatgagttgagtctgtttcttcaggaagagggaaatttatatcgaaaatatgtcgagacacattaccagaaagggtatgagctggagacagtcaaaaggctgctggagaaatccggcatgaagtttgtcactgcatacgatgcatttacaaggaatccaccgacaaaagaaagcgagcgagtctatgtgatcgcaagggaatctggaaagtgcagggaatagatcagagacagatcagaaacagaaaacaatgaaagaggaagaaatttatgacagattatattgtaagagcaacagcagcaaataatcagattcgtgcatttgctgcaacaacaaaagagaccgtggaggcagcgagacaggcacataatacaagcccggtcgcaacggctgcgcttggaagacttttgacgggcggcgcgatgatgggaagcatgatgaaaaatgacagtgatatgttaacgatccaaatcaaaggagatggtccgatcggagggcttacagtcactgcagacagtaagggaaatgtaaagggctatgtggaacacccggaggtcatgctcccaccgaatgcacaggggaaactcgatgtggcaggagcgcttgggattggtttgatttccgtaatcaaagatatgggattgaaagagccatatgtagggcagacaattcttcagacgagtgagatcgcggaagatctgacttattattttgcaacttctgagcaggtgccatcttcggtaggacttggtgtactgatggaacacgacaataccgtgaagcaggcgggaggatttattgtacagctgatgccatttgtagatgacgatgttgtagacagactggaagcaaatattaagaaaatttcttctgtgacttctatgttggacaaaggaatgacaccggaggagattttagaagaagtactggatggatttgaagtagaagtaaaagatacaatgccggcacagttttactgtaactgcacaaaagaacgtgtagagaaagcaatcatcagcattgggaagaaagatattcaggagatgatcgaagatggaaagccgattgaggtcaactgccatttctgtgggaagagttatgaattttctgtggaagaattaaagacattgatcaaaaaagcaactagataatcagaaggagcagagagtatgaagcagggatttgtaaaagtggcagctgtcacaccgaatatgcgtgtggcagacgttgaatataatgtaaatgaaatctgcagaatgattgatgagacgacagagcagggagcaaaggtcattgcgtttccagagttatgtattaccggatacacgtgtggagacctgttctcacaggaaattcttttgcgtgaggcaaaacaaggattatatcggattgcagagtatacaaaggagaaagatgcacttatttttgtgggagtcccttatgaagtcgcgggaaagctttataatacagcagcggcactaaatcatgggaaggttttaggattggtgacgaagacatttcttcctaattatggagaattttatgaaatgcgccagtttcaggcaggaccacagtccgtacagatgatcgagacggaaggacacaggattccgtttggtccgaggctgctctttcaggcggagacgatgaagcatctcgttgtatctgcggaaatttgcgaggatgtgtggtctgccgtaccgccaagtatcgaggcagcggttgagggtgcgacattgatcgtcaattgttcagcgagcaatgagattgcgggaaaagaagagtatagaaggagtctgatcgcggggcagtctgcacgtcttcttgccggatatgtatatgcaaatgcgggagaaggggagtctacgacagatcttgtgtttggaggacataatattattgcagaaaatggagagattttaaaagaatccaagcgttttacgagtggcgcaatttattcggagatcgatgtggagatgcttcttggagagcgtagaaagaatactactttccagagaaagggagagtattcgattccttacattccgtttgagattgagaaagaagagaccatgttgacaaggaagattccgatgtctccgtttgttccggagaataaggttacgcgcagcagacagtgtgaggaaattttgatgatccaggccgtcggtctgaaaaagcggatgctgcacacgaactgtcagcgtgcagtagttggaatttcaggggggctcgattctactctggcattgcttgttactgcaaaatcgtttgatcttctcggaattgacagaagtcagattctgtcagtgacgatgccttgttttgggacaacagacaggacttatcaaaatgcatgcagattgacggaaaagcttggagctacgttgagagaaattccgattcagaatgcagttagggtacattttgaagacatcgggcagtccgaggaagagcatgatgtcacctacgagaatgcgcaggcgagagagcggacacagattctcatggatctggcgaacaagacaaatgggatggtcattggaaccggggatatgtcagaacttgcacttggatgggcaacttacagtggggatcacatgtctatgtatggagtcaatgcctctgtgccgaagacattggtatatcatcttgtaaggtattatgctgaagaatgtgaagatccagaattaaagggactactctttgatattttggatacgccggtaagcccagagcttttgccgcctaaggatggggaaatcgtgcagaagacagaagaaactgtaggaccgtatgaactacacgatttctatctctattatgttttgagattcggttatgaaccgtcaaagatatatcgtttggcaaaatatgcgtttggtgggatttatgaagatgagataattttgaagtggctgaaaaaattttattggagatttttctctcagcagtttaaacgatcttgtcttccggatggaccgaagacaggaacagtgtcgctttcgccaagaggcgactggcggatgccgagtgatgcatgtgtgacactttggcagaaagatttggatgcactagaatagactaagaagaggattctacagagatttctcatttggaataaaatagtttcccctaagtcttgataaagggtataaaaataggatggagagtagtcaaactcaccatccttatttttttacgcttctacaaaaacatcttttccaagaccgcagagtgggcatacccaatcttccggaagatcttcgaatgctgttccaggtgcgattccgttatctggatcaccgatttctggatcatattcatatccgcatggttcgcaaatatattttttcataaagtcacctcctaactgaatggttataaaaatataaaacacatatcaggaaatcctgaatatattatgatcatatttctgcaagttattctagcagaaaatcaggaaaaatacaataaaaaaacgatgaaaaatgtataaagcttattgagtgccgagatatttggacaaggcttctagttggacaaggacttctcgctgcctttcttctggcaacgaatgaaatactaataacatccgggtttccagacgggaaagggataatgaagcatgtccgggcttaatttctaatacatcatcggcagaaagatcgtataatcttgccaaggttgcaaaggtattcaaatcgggttctgcaacattgttctcatatcccgacaaagatttccgattaattccagttaattccatgacacgtttttgtgtatagtctttattttcccgcgcatttttaagggtaagtccaatatttttcatgaaattctctttttttgattaatataaaccagggctctatgaaaattcatgaaagtccgataaaaatggcgtttgctagctaatatcttaaaaactaagacttataatagtggagaatagaaaagcatgcgtgtgagcttgagagatgaatgcaggtacgtgaacagaagagtggggacgcagcttttgaaagtgtgagcaaaaaagaaaagtgaggtagtgttatgaagaaaagatttgtagcaaagcaagtaggggtactttcattgacagcagttctcgctggaatgccagctgtaaatgtacttgcagaagatgtgtatcaggaaaaagtgggtgaggtgcagacagaagcagagaaggctttgttaagagcagctttgaatgtgtcatttgtgactgaatatggagaaaatgtaggaaatacttatgtggaatctgatctgttatggccatgggatagctatacatttaagttggggacagactacaatttgccagagggatgggaacttgttggaactgcggaagataaaaccgttaaatgtggggaaactgcatctgttgaaattcttgtgaaaccagttgcagcagagacagttacaacgagagcgacaatcaattttaagacaatttatggtgaagaagtaggaaaaactgtggcagaaacaacagcgacaggagaaggtgactggacgttcatgctcggaacagactatcagttaccagaaggctggcagcttgcagcaggagtagatcaagttacaaatattcaggtaccatttggagcaacagcaggacacaccatgattgttgaaaaaaacacagaaactccagataaactagatccggagaatccagaaaagccaaatccagagaacccagaaaaaccaaatcaagataatacaaacaacgatgacgggaaaacacagaatacggataaaaagacagagaataaagctaaaacaccaaaaacaggtgatgatcttcaagctgcaggtacattttcaatcttaggagcaggggcgcttgcagcaattgcagcattacttaagaagagaaaatagtagtcagattctgtatcgtaagtaaaaattaattagtattgccaaaaatgcagagaatagctctgtgtttttggcaatcttttttgaaatgaaaggaaatttggagaagaaaatcatgcgaaaaacaatgagaaaaataggtatgatgactattttcttttgtctgattgcaatgatggcagcaggatgtaaaaaagaagaaaaggaagaagtgaaaaaagaaaaaggaaagacttatgaattcttttatgacaaacttccaaaatcagatcaaaaagtgtcagacgaggaaaatgaaaaaatcaagagaggagtggaaaactgggcaaaatctgtcatgttggtagacagttctgtgagtaagcagaatcggaaaataatcgataatagcttttatcagagtatcgtagatgacaaacagagagaaaaagtaaaaaaggacaggaaaacattttataaagacagtgaagtgcaggtacagagcgcagaagcgaagatagaaagtgcatatgcgacagaatatcaggggaaacagattggaaatgttacttgtgatgttgtattaaaaggagttaaagacggaaataatttttctcgtacctatcatttaaaacttgcagtaagctatcagaatgaagtggtatcaatctatgaaataggaaatattacctgggaatagtttacgatcttgtcaattaggatataagcagtaagaagcaggcatatagtaaagtaaaagaaaactggagaacggtatgaaaaaaatctggaaatgctgtttgtttgttgtgtctgtgtttcttctggtcgtaggtgctgtgtggcatctcccagagatagttactgtaagcaataatgtttacggaaaagaattaccgattcagtcggtggaaacagaagagaagaaggcagtgctgacatttgagtgtgcatgggatcacagtagtataaaggacatactggagattcttgaggatcataatgttcgtgctgctttttttgtcactggggactgggtgaaacagtatccggaagatgttcggaggatcgttcaaggagggcacgatatcgggaaccattcggcgacacatcggaacatggtacagcttgaaaaagaggagatagagaaagaattaaaagagacacatcaggcagtaaaagaattgacagggaaagagataaagttcttccgaccaccttatggtgcatttaatgatacggtgattttgacagcaaaagaagggggctatcttactgtgatgggaaatatagactctatggactggaaagattatggagcgaagacaatcttacggacagtgatggaagataaagaactgcaagggggctcaatcatccggctaaacagtgaggcaaaatatacgaaagaggcattgccaaagctcattgaaagtctggagagagaagggttccggttggtgccgctttcacagctgctgtatgaggaagcatatcatttagatgtgaaaggaaggcagatcccagatgacaggtgatcagccttcttttttgagaggatttggactgtggacagtcaggatttttgtaatatgatttgtcttgttggaccagttatgaggaatgcatgatgggatgtggacggaatcaccgggataaagctgataagtgataccatcaatattcatcgtgaggattccttctaaaatataaatgaattcttcgccggtgtgattgtagagttccagagtctctttttcttcaggaagaggaggcatgatctctacaaggcgcggaagcagatcgaaactggtcagatggtcagtcaatgcatattcaatgatttccgagttgacgagggtagtctccttttcatagcttcgcactacatattttgtctcctgtggtgaggagagatcaaaaaaggacgagagttcaacttccaatacctgggcaatcttttccaaagaatcaatcgcaatactggtcagtccacgctcaaactgtgacaaaaagccgatggaaagaccggtctgttcactgagatattttaatgtatattttttttctgttcgcagttctttgatgcgaaatccgatgacagcacttttattcacactggatgctccatttctttttatttctgtttctatgataaaggatttgcaggaaaaaatcaattcacgagatatgaattttataaaaagtcaaaaagttttttatgaaagaagtaattaaaaaatgtaaaataattttatgacaaaataaaaatactgtgatataatatgaaaaaatgataaaaatttcatttttatgaaaatataaggatgaattttagccataaaaagaagaatcctgacggaagaaaaggtggaggggattatgaaatatcctgagattatgaatattcagaaatattccatacatgatggagatggaattcgaacgacggtcttttttaaaggctgccatttaaagtgttggtggtgtcacaatccagaaagtcagaaatttacgcctcagctgatgttccatgcggaccggtgcggcgggtgtcatgcatgtgaacagatctgtagtcaccatgcagtgacggttcgggatggaattgcgtgcacggaccggacaaaatgtgaactttgcagagaatgtctggatcattgtgtgaataatgcgcgagagattgtggggaaggaatacacgatttcggaattgatgaaagaaattgagaaagactgtatgttctatgaggagtcaggaggaggcgtaacgttatctggcggtgaggtcatggcgcaggatatggactatatcgagcagttattaaagaagcttaagagaaagggatacaatgtggcaattgacacatgtgggtatgcaccgcaggagaattatgagcgcgtgctgccttatgtggatacatttctatatgatatcaagacaatggatccggaaaagcatgaaaaatatatggggaaagacaatgaattaattttgtcaaatcttcgtttcatcagtgaacgtggggcaaggatttatattcgtattccggtcatcggtggagtcaatgacacggaagaagaaatggaagcaatgattacttttctgaaacaatctatttctgtcagccagatcaatctgctcccgtatcataatattgccgggggaaaatatgataagctggatatcagatataagggggaagcatttacgattccgccgaaagaacagatggaagcattccagagacaatttatccaaaatggatttgcaaatacaaaaatcggaggttaattatgagaagaggtatgaacgaaagaattcagaaactgagagaacagagtgtcaatgcagttccgcacatttatatggagcgtgccgatctggagacagatgcgtacataaagtacgaaggatctgtcagtgtaccggagatgagggcactggcatttaagcattttatggcaaataagacactttgtattaatgaaggagaactgattgttggagagaaaggggacagcccgcagtcggcaccgacattcccagaactttgctgtcatacactggaagacatgcatgtgatgaatgaccgggatctgatcagtttcaaggtaacagaggaagacttaaaacttcagaaggaaaagatcattccatactgggagaatcgttctatccgtcataagatccttcacaatatgagcagacggtggaaagagtgctatgaggcagggattttcacagagtttatggagcagagaggaccgggacatacagttggttctgagaaaatctacaaaaaaggatttctcgattacaagcaggatattatcgagagcagaaaccgtctggatttcctcaatgacaaggaagcacttgacaagcgtgcacagttaaatgcgatggagatcgcctgtgatgcaatcattatccttggagaacgttatgcagcgcttgcaagagaacttgcagagaaagaggaagatgaagtgagaaagcaggagctgctacagatcgcggtaaattgtgatgtggttccggcacatgcgccacagacatactggcaggcgatccagatgtactggttcgtgcatcttggtgtgacaacggagttaaatccatgggatgcgtatagtccgggaagactggatcagcatttgaatccattctatgaaaaagatacagaggcaggcattttagatgatgagaaagcgctggaacttttagaatgcctctgggtgaaatttaacaatcagccggctcctccaaaagtgggaatcacattaaaggagagcagtacttacacagattttgcaaatattaataccggagggattacaccggatggacagaatggagtcaatgaggtcagctatctaatcttagattgtatggatgaaatgaagcttttgcagccaagttcgaatgtacagatcagcaagaagacaccgatgaagttcctaaaacgtgcctgcgaaatttctagaaaaggatggggacagccggcattttataatacggaagcgatcatacaggaattgctaaatgcaggaaaatctattgaggatgcaagaagaggcggaacgagtggatgtgtggagaccggtgcattcggaaatgaagcatatattctgacaggatatttcaaccttccgaagattctcgagatcacgctgcacaatggttttgatccggtcagcaaaaagcagctcgggcttcagactggggaggcaacagacttccattcttatgaagaattgtttgaggcttataagaagcaggtagaatattttgcagacatcaaaatggaaggaagcaatattattgagaagatctatgcagaatatatgccggcgccatttctatctgtcatcacaaacgactgcatttccaacggaaaagattataatgccggaggagctcgttataatatcaactatttgcagggggtaggaatcggtacgattacagactctctgacagcgatcaaatacaatgtgttcgatgagaagaaatttacgatggaagagttaatggaagccatggaacacaactttgaaggatacgagaagattgcaaatcttgtacgcaacaagacaccgaaatatggaaatgacgatgactatgcagacgatgtgatgcaggcagtctttgacttctactatcatacagtcacaggcagaccgaacatgaaaggcggtacttataggatcaatatgcttccgactacctgtcatgtgtactttggtgaagtgatgttagcaagcccgaacggaagacttgcacataagcctgtatcagagggaatctcgccggagaaaggtgccgatatctgtggtccgacagcggtagtaaaatctgcatctaaaatggatcatgtacggacagggggaacgcttttgaatcaaaaattcacaccgagtgttgttgcaggggaagaaggattgacgcagatggcaaatcttgtgcggggttattttaatatggatggacatcatatccagttcaatgtcatcgacagacagacactaatcgatgctcagaacaatccggaagagtataaggatctgatcgtgcgcgtagcaggttacagtgatcacttccgcaatttgagcaaagcacttcaggatgaaattattgaacgtacagaacagtcatttaattaggaaagatgcttttgaaagcttttgtgaaaggagaaagaaaacatggagaagaaattagggtttatcggcgccggaaatatggcaaaagcgatgatgggtggaattttgaagaacgagattctgttaccggaggatgtgatcgcatctgatctttatcagccgggattggagcggatgaaagaggaacttggaattgctgtgacaacagataatcaagaagtggtaaagaaagcagaggtagtcgttctgtctgtgaaaccacagttttatgcagctgtgatcgaagaaatccgggaagtggtatcagaggggcagattatcgtcacgatcgcgccgggacagacgctggaacatttgcaggaattattcggaaaaccggtgaagattgttcgcacaatgccaaacacaccggcgcttgtgggagaaggcattacaggtgtctgcaaaaatgaactggtgacagaggaagaactttcctatatttgcaaaatatttagtggatttggaaaagcagaagtattaagtgagaaactgatggatgttgttgtgtctgtaagcggaagttctccggcatatgtctttttattcatcgaggcgatggcagatgcggctgtcgcagatggaatgccgagagcgcaggcatataaatttgcagcgcaggcagtttatgggagcgcgaaaatggtgttggagacaggaaaacatccaggagaattaaaagatatggtatgctctccgggagggacaactatcgaggcggtgcgcgtactcgaggagaaaggattcagaagcagcgtcatcgaagcgatgaaagcgtgcgtaaaagttgcaaaagagcttggaaagaagtaaaatagaaaaaaagtgcagcaagaaaggggttacgcagcgatgaaataccatgcagatgaagagagatataataggatgaagtatcacagatgtggaaagagcgggctgaagcttccggcggtgtcacttggactttggcacaactttggcacaatggacgattttgagacgatgcgtcagatgtgttttactgcttttgatcttggaatcacacattttgatctggcaaataattatggtccgcttccgggaagcgcagagacgaattttggaaagatcctaaaagaagatcttggaagttaccgtgatgaaatgatcatcagcacgaaggcgggatatgatatgtgggagggcccttatggcagtggcggaagcagaaaatatctgctggcaagtctagatcagagtctgcagcgcatggggctggagtatgtagatattttctatcatcactgtgtagacccagagacgcctgtggaggagagtatgatggcgcttgatgcggcagtgaagcagggaaaggcattgtatgcgggaatttcgaactatgatctggaacatacgatgcaggcgatggagatcttaaaggaattaaaatgtcctttcgtgatcaaccagattcgctattcgatcctagatcggtggattgaaaatgatggtttgaaaacatttgcgaacaagagtggctgcgggctgatcgcattcagtccgttggcacagggactgctctccgacaggtacttgcacggaattccggaagacagccgcattcggaaaagcggaagattcttaaaggagagtgcagtcacaaaagaacggttagagcagctggaggcgttgaatgaagtcgcaaaagagcgtggacagacactggcacagatggctctgtcctgggtgcttcgcgatggagatgtgacaagtgtcctgatcggcgcatccaagccggaacagattcgggagaatgtaaaaatcgttgaaaaaacagagttcagtgaagaagagcttagacgaattgatgaattgtcaaaagcagtcacaaaatagcagtgatttcgttgacaaataaaatagggattgttatgataaaaaacagacgagggcgttttccgtgcaggaacgccctctttctggatcgcataaaagtagcagcagaaaactcggttttgtcggggaggaagttatgagaacatatacgaaggacgatattatacaaattgtggaagaggaggatgtagagtttatccgccttcagttcacagatatgttaggaacattgaaaaatatagcaatcacagcaagtcagcttccaaaagctttggagcacgcatgtacatttgatggatcctgtatggaaggatttatctggttggaggaagaggatatgtatttacaccctgatccatctacgtttgaaatctttccatggcggccacagcaggggaaagttgccaggttgctctgtgatgtctataagtgtgatgggacaccatttgagagcgattcccgccagattttaaagcggacgatcaagcgggcgcaagagaagggatacacgatggaagttggaagtgagtgtgagtttttcctcttccacatggatgaagagggaaatccgacgacagtaacacatgagtgtgcaggatattttgacatcgatccgatggattttggagaaaatacaaggagagatatcgtactgacattggaggagatgggatttgtgattgagtcttcccaccatgaagtggctccggcacagcatgagatcgtttttcggcacagtgaggcactgtctgcggcagatgatattctgacatttaagatggttgtgcggactattgcgaaaaagcatggactgcatgcaacatttatgccgaagccgaaaagtgagagcaccggctcggggatgcacttgaatttgacacttcagaaggagggaaagaatctatttttcgatgagaaggatccttatagattaagcagagaagcctattattttatcggaggattaatgaaacacatcggcgcagtgtctctgtttaccaatccgatcgtcaattcgtataaaaggctgataccgggatttgatgcgccgatttatgcaaactggtcagtcaagaagaaaagtgctctgattcgcattccatttgagaaagaagaaaaaaaatggatagagttaaggagtccggatgcatccgcaaatccatatttggcactcgcagtctgtctggcggcaggaatggatggaattgagaggaaaatccttccgccatcctgcattgacgaacaggaatacagggaacagagtcagaaactggaagaaacatgcagacttccgaagagccttttggaagcggtggaagcctttgagcaggatgaactgatgcaaagtgtgatcgggaaagaattatcgcaaaaatatattcagacgaagaagagagaataccgggaatactgtgcacaggtgactgcgtgggagttggaacaatatttgtatcggatataggaagctattctgtcaaacgaaaagatgcagggaggggtgagcgtgagcaggatcatagtggcaattccgaaaagggagaccggaatacagattcggaatctgcttgtccgaaatggatttgatgtcatcggagtctgcacttccggcgtgcagatattaaactatgcggatgttctggaggaggggatcgtcatttgttcctgccagctcaaagatatggtgtatggagaattacgagcggatttgccgcagtcatttgagatgctggtgcttacaacaggaaggcatccggtggaggaaacggcacatatcaggacgctttctttgcctctgaaagtgcaggaattgttagagcaagtgcgggccatggaagaaatgtttgagtggcagagaagaaaaaggcgcggcagaaagagtgaacgaaatgagagacagaatcagattatttccagagcaaaggcgcagctgatggaaaagaaagaaatatcagaagcagaggcacaccgatatttacaaaaatacagtatggagagtgggaacagcctgacagagacagcgcagatgatattagagatgatggatgagcgtccatcagaaaaataaaagagaaaagagaggaaccgcagatgaaatttacaaaaatgcaaggattaggaaacgattatgtctatgtaaactgtctgaaggaaaaagtagaatctccttcggaaatagcacgaagagtcagtaacagacattttggagtgggatcggatggattgattttaatctgtccgtctgaatgtgcggattttgagatgaagatgtataatgcagatggctccagaggtgaaatgtgtggaaatgggattcgctgtgttggaaaatacgtctatgattatggtctgacagatcagacagaaatatctgtagagacacttggagggatcaaacatttaagtctgacggtagaagaggggaaagttgcacttgtaaaagtagatatgggatccccgatttttgtgccagagcagattccggtaaaagtagaagggaatcacgcggtaaatgttccaatcagtgtggatggagacgagtatcggatgacctgtatctcaatgggcaatccgcatgcagtcgtatatctggatgacatccaaaatatggagatcgaaaaaattggaccaaagtttgagcatcacccatgttttccgaatcgagtgaataccgagtttgcccgcgtgcttgatcgcgagactgtagagatgcgtgtatgggaacggggatccggggagacgctggcatgtggaacgggagcatgtgcggtggctgtggcaagtatggtaaatggtcttacagaggactgtgtgactgtgcagctgcttggaggcaatctgaagattgagtgggacagagaaaaaaatgtcgtatatatgaccggaccggcgacggttgtatttgatggagaactttatgaatagcaattcggaggcgggatcttgcagcacaagatcccggttatcaaacgacctggagcttcgagtttttagtgggaagggaaagtgccaaaatccgttgaaaaatatacaaaatgaaaaaaattaaaaaaaataaaaaaatttcaaaaaaggtgttgactttttctgtaactctgctataataggttttgttgagtgagggacacaaaacaaacacaaaaaacaataatgaataatgcggaatggtgtaatggtagcacagcagactctgactctgttagtaggggttcgaatcccttttccgtagtttaaacttcattgaatacagtgaagtttttattttcggagtgtggctcagcttggtagagcgctacgttcgggacgtagaggtcgcaagttcaaatcttgtcactccgatttttttatatccataccgggaatctttgttgataagatttccggtatttttttgttgtcaagacgcgcttccattttttttcagaaggaagtataattttattaacaaaagtttccgtttggcttataaaaagaggaggatgtagtatgagtgaatctagaaatattttttatccacaaacagaaatcacaactgttttagttcccgtaacacgaggctgttcatttaatcagtgtgcattttgttccatgtacaaagaggaagcatatgaagaggtgatgcttcaggagattgaatttgaattgatgaatggagaaacttataccgaacgtgtatttttgacaggagcagatcctctttctgttggatatgaaaaaatgatgcgtattttaaaactgattcaaaagtattatccgtactgtggatgtgtggctatgtatgcagctgtccgcacgataaacaattatactgtggaagaattgaaacagctccatgcggcagggcttagacttctatatatagggtttgaatcgggaagcgatgaagttttgaagagcatccgaaagggacataccgtaaaaacagcgattgctgtaggaaaaaaattaaatgaagcaagactgccattcaatgcgattgtcatgtatgggattgcaggggaaggaaattcagaagagaacgcaaaaaagacagcagagatgttaaatcagttttcagcaagtaagatcattactatgaatttaacagtatttgcaagtacagaacttgcaaagatggaacaggaagggatgtttgtgcaggctggtatcaaagaaaaaatatccgaggtgagaattcttctggaaaatcttgatgtgaaaaaaagaacagaatttgatacgacacatgccacaaatattataaagttattgggaactctgccggacgaaaaagaaatactgttagagaaaatcaaaaataatactatgaaaaaacttaaggatgataaaaaatagagaaaatggatagaagtggatgaagaggagggaacggatgagaagaaaaagatgtacgctttgtggtgggaagctggttaatggaatttgtcaggaatgtggactggataacagaaagtcggacagtagatatcagaccagaaatgggacaccgcattgggggaacgaaacgaacgagagaggaaaggttcaaattccaaaagaaaagactgggaagaaaacagagttacagaaggcaaaatcttctacgattgtccaggcagaaaagaaaacttccgggaaaaaagggacaaagatatttgcggggatagttctttttctctttctgattaatatagtctcctcgcttgcaggagaaatccaggaattttttatggaaagaaattatcaggtggcagatgagtctgatccatatgcacagaccgatgcggttctgagagaaacgggagcattttttgaaaatcagctggtacaaggggagtatgttgtcggggtgcatatcccggaaggaaaatataccatagaattgatggaagggtatggcggaatgcaggtattggacatggaacatagcatctatatctatgagtttttttcggaagagtatgaagcgggaacagattctattacagagtgtgaggatgtgagattatttgcgggagcgacagtaaagatcctatcttctggagtacggcttcgcttttcatcagaaaatgcacagatagaggaaatgactggaatcaaaaatccattgaccgaacaagtgcatctgaaagcgggggagaagttgagggcaggaaaagactttgaagcgggagtttataatttgtattatgaagggacaaaagagagagaatatgggacgtttgcgtggctggttcccggcacagttaccgaggaggcgagaaaagagtatgatgcctatacggaggttgtgtttgtagaagacagactgagtgaggttggaggacttcattgctgcaatattgtacttccggaggatacggtcatctattccaaaggagtgggcgtacggcttgttccaagtgaagtgatcgtgtcagaagattatgcatcagcttatgaatatattgatacagaagaatagaaatagaacagaaacgtgcagatagggaaaagaagggaaactccgggataaactcagacattgcttgacaaatatctttccagccaataaaataagacgtatgtttgtaaaacatacaggaagatgctgatatgcaggcatttgcagcatcattatttattttttatgaggaggagcaggatgaatccgattgtagaatttaaaaatgtcagcaagacattctatacaaaaaatggtccgtttcaggcgctgaatcagattaatctcgcaatccaggaaggagatatttttggcattatcggtctgagtggtgcgggaaaaagtacgcttgtccggtgtatcaattatctggaagtaccgacagagggagaagtacgcattgcaggacgcgatcttgggaagatgaatcagaaggagctgcggagacagaggcaggaaatcgggatgatttttcagaattttaatcttctgatgcagcgcaatgtgctggataatatttgttttccactggaaattgcaggagtgaaaaaagcagatgcaagaaagcgtgcagaagagctgttagagattgtaggattaagcgataaggcgaagtcttacccatcacagctgtcaggaggacagaagcagagagtggcgattgcccgcgcgcttgcgacaaatccaaagatcttactctgcgatgaggcaacaagtgcactcgatccgacgacaacaaaggcaatccttgcactgttaaaggagatcaaccagaaatttaagattacaattgtgatcattacccatgagatggcggttgtagaagaaatctgtaaccaggttgcgatcgttgatgcgggaaaacttgtggagacaggaagtgcgacagatgtattttccaagccacagacagagattgcaaagcaacttgtatataaggaagaggcaaatcagcttgaggtaggcggaaagagatatgtccgtgttgtatttgacggaaattcttcgtttgaacctgccattgcggatatgattttgaattgcagagtccgcgtcaatattatgggggcggatatgaagaatatcgatgggaaagcatatggtcagatgatcttacagatgccagatgaggatgtgaaagcgcagcaggcaattcattatctggaagagagaaatattattgtagaggaggtcaccgcacatggaaacacaggaactcattaaaatgctcgcggaaggttcggttgatacactctacatgacactggtatcaacggcacttgcatatgtgattggatttccgatgggaattgctctgatcgtgacaagaaaggatggcttaaaaccaatgccggcggtgaatcggattttggatatttttgtaaatattttaagatctattccatttttgatcttgttgatcgcagtgacccctctgacaaaactgattgtcggaaaaagttatggctctaccgctacgattgtcccgctcgttattgcagcggcaccatttattgcgcgtatgatcgagtcttctttgttggaagtagaacacggtgttgtggaggctgcgttaagtatgggagcttccccgcttaaaatcatcgtgaaagtattgatcccggaggcgaagacatcattgatcgtaggatgtacaatcgcactttcaacgatcctcgggtattctgcaatggcaggagttgttgccggaggtggactgggtgatattgcgattcgatacggataccatcgatatcagacagacatcatgttgatcacagtcattgtacttgtattgatcgtgcagattttacaggaagtcggaatgcagatttccaaacggacagataagagagtgagaggataaggatatgaagaatagaaatgcaaagagaatattggcagcaggagcagctgctgtgcttgcagttggattgactgcatgtggaggaaaagaaaacaaggcagatgataagacaatcacggtggcggcttccccgacaccacatgctgaaattttagaggcgtcaaaggatcttttaaaagagaaaggatatacactggaaatcaaggaatttgatgattatccgcagcagaatgttgttgtggatgagggagagtttgatgcaaattatttccagcaccagccgtatttggataattttaatgaagagaagggatcggatctggtaagtgctgcaaagattcattatgagccgctggggatttatccaggagcatccgaagaccttgagaatataaaggacggagcaaagattgctgttccaaatgatgcgacaaacgaggcgagagcgcttctgcttctggaagaaaatggaattatcacattgaaggaagatgcgggattgaatgcaactaagaaagatgtggaagaaaatcctcataacattgagattgtagagctggatgccgcacagatcgcgagagtggtagaggagctggattttgtcgtattaaatggaaattatgcgctggatgcaggatttaatgtgcagacagatgcaattgcaaaagaagaggccgattctgaggctgctcagacttatgcgaacattattgcagtgaaaaaggaaaacaaagatagtgagaagatcaaagcacttgtggaagtacttcagagtgaagagattggaaaatttatcacagacacttatgaaggtgccgtggtaccgatgaaataacagtgaatacaagagaggacagtgtttccggcaaatagtaggactgttctcgaaatattaaaaagctgcctgcagcatgggaaacgttccgtagttgcaggcagcttttctgttaatgaatcctgctatttaacaggatattctaggatataatcatccattacaaacccgccgccgatatcgctgacttgttctcgtgtctgaatgaatccaaagtgtttatagatggcgagagcagactcattgccacggttacaggtcagccagattttatcaagggaacggactttacaaagttctatcaaatttttcataactttagaactgatgccatttccacgaaaatctttgtgaatgtaaagtttgctgaggaaaagacttccattttcttcatgtaccccagcaaaacctgcgaatgtataatcgtgaatcagcagaaaatattcatatccattttgaatctgcgcaaaaatagagtcaaaagaaagaaatttctcaagcatataatcaatctgctcttcgctgatcagagctggaaaatattcatgccagatttcttccgccattgttgccacatttaaaataagttcttcatttgttaccggtaaaattcttaaatcatccattgaaaataatctgccactcaaaatgtgattaaatatactcatcacatcgagaaattgaagtcctcacggatacttcttactgtttcaatgtgtatgctttggcgattggaagcaatacgctactcacaagttcttgtacactccacagtcgtaaattcccgaaatagccttcggtacatacttacatttgcgttcattatgcaatttcgtaagtcatagcatctcttagatttagtgaagcattgaaatctctatcttccatgtaaccacattcacatttgtaaattctatcagaaagttttaaatctttcttaatacaaccacaattgtgacacagtttggaagatggataccatctgtctactactcttaactcaattccattttcattacatttagattttaattttgttcgaaattcatagaacttttgtgaggcaatggtttttgatagatgcttgttctttatcattcctgatatatttaaattttcaatagtgatataagatggtttggtttttaccaactcagctattgttttgttaatataatcagttcggatattgtttatcctgtgataaagtttctgtactttaagcttttgtttttgtatattttttctttgagtggtctctcctttctttaaattttcatatttacgagaaagacatctttgctctctgcgtaattggttttcgagtttctttaattttgctgttttattgatatttttataggttttaccgttagaaacaatcgcaaaatttttcaatcctaaatcaattccaattccttcattattttgattggtaattcgagtatctggaagctctataagaacagatacatagtatctgtctgctttaacggaaatagttccactttttatgttccatccatcttttgatgttggaatataacctttttctttcaaacgtacccagcctaatgttggaattttgatgcgatgtctttcacataaacaatccaaaggattgtttttcacaaaatacatttttacatctgatttacctttctttttgaaatttggaaaagcactttgacgtttgaaaaatctcctaaaagcagtacatccatcttcaatggatttctttaaggatttagaactcacttcttttatccattgatattcaagatgatttggtaaatactcattgttaagccagacactaaaatgcttaccactcataaatttttgaccatgttcataaagtgctttgttatgagctagataaaaattgtaaatatatctacatgtaccaatagtcttatttatcttaactttttgttcctgtgttggattgatttccgtcttgaagcttttaagcaatttccacatctctttctatttgtcttttatacttacgaagtccgtacaatctacaagaaaatacatgaagaatcgaaataatatcttgtacaagttcttcttgtggtgataattcttcgttattcactaccactatacttgtattgaatttcatgcaaaatttttcaaaccaatcataaccaaatctaataaatctatctttatgagtgatgatgatagttttaattttttgttccattacttcatctaataattgattccattttttacgattgtagttaagaccacttccataatcttcaacacattggtctacaatcattctttttgcattacaaaattgtcgtaaaaatgtcacttgattttgtaaatcatgtttttgatttcttgtagatacacgagcataaatcacggttttacgagtatcatttgcaatattgatacctttaaattgaagatattggtcgtaagtataataacgtctatcagttggtgtacgatgagcttttagaatcccttctctatcccaacgttgcaaggttttgacggaaacacctaataattcagcaaaatcttttggtttgtaattcttaatatttgatgtgttcataataatacatccataagtatatttaaacacatttgatcatgaatattaatatttttatttacttagtataatctcctttatccatatcgcatatagcgattataacatgaaatggcaaaaaatacatcgcacatttgtgaatttattcatcttttgtcaaaagatcatcgatcagaaagagaagatgttcctgttgtgtagttgtcaggttcataaatttttctgtaagttcctgagaagttgcaggatttttatcagattcatcgaaaaaatctctcggatgaattttcagaaaatcacagatataaaagaaagaactcatggaaggaagcgcttttccgttttcgattttattgatataactttcgctctgcccgagtgacaggctcatgtcccttgccgagattccctgtttgtttcgtaggtgtgtcagtcgtttgtaaaataatgtgaaatgatccatagctctaaatctccttcgtaaaaatgtatgttatcgtttagtagaaaaccacatctgactgaaaatgatttccagattttctctatactggagttccatgcaaaatacctgtctttagaattataatctatagaaagttgaaaaataaagaattaaagtatggaaatagaatgaaatgaggaattgaattctgttttatgagaaggtagatggaacaagataatagaaaaaaactataaaagcatacaattatagaaaatgtcgaaatatataactgaattatataaaaatgttgaaatatataatataattccctatacttaaaaaggatatatactatcgaattttgaggaggaaaaaagaatgaaaaaaagaatgatgagcattttgcttgctactgtatgtatcttcagtataggtttgacaggatgcagtgggaaggaagaaaagaaataggagaaaaaagaagtaacaactttaaagattggggcatcaccaaatgtgatagaagttgttcatgctatggaagacagtttagaaaaggaaggatacaaattagaagtagtagcatttgatgacattaagcagccaaatgtggcattagatgaagggtctttggatggaaatctttatcaacataagccatttttagattcctttaataacgataatggaacaaaattaaaatttgtagaaccgttatttggtgggtttactgcattatattcagaaaaatggaattctgtggaagaaattcctgaaaatgctaaaataggtattttccaggatgcaagtaatcagcatagggcgctggcattaggagaagaggcaggattatttactttgggggaaccttctaataatggaatgtacactttgttggatattaaagaaaatccaagaaatcttgagttggttccgttagatactggtggattgaatcaaggacttacggatttggatgggtgctttaatcagggaacatctatgtttctcgcagaaaaggatcctacatcatatattgccattgaaaaagataattctaaatttgcaataggtcttgttgtcagagaggaagatgagaatgcagagtgggttgagccgtttttaaaagcatttcgaacagaagatacgaaaaagaaaatcgatgaatactatcaaggaagttatgtatattttgactaaacgaatggacaagagaatatgatagaagtttcgggattagaaaagaaatacggtaaacttcaagtattggaaaatattgacctggagattaaaaaaggtgaaatttttgggttggttggcttgagtggtgccggaaaatcgacacttttaagatgtatcaatgggttggtaccttatgatggaggaagtcttaaagtacaggggattgaagtacagaaattaggaaaagcgcaattaagaaattttagaaaaaatattgggatgatttttcaaaacttttcattactggaacggtgtaatgtgtatgaaaatgtggcttttcctatgaaagtatggaaaaagaattcgatggaaacggatgagcaggtaagaaaaatggttcggttagtaggactagaagacaaaatagaaagtagaccgagacagttatctggtgggcaaaaacagcgtgttgccattgcaagggcaatggtgacagagcctgaaattttgctctgcgatgaggctacgtctgctttggatccgaaaacagctacttccattttgaatttattaaaagagattaatcagaaaatgggagtcacaatcattattgtcactcatcaaatggaagtagtagaacaaatatgtgacaggatggctcttttacaagctggaaaaattatattgaagggagaagtaaaacagctgtttttggaaaattcagaaccattaagagagttgcttggaagaaaacttacttttgagccaggggtgtttatcagaatattaatagaaaacaaatcgaattataggaagtttttttacgaattatctagtgagatgaaaattgcatatgaaatatgtgatggaggaatcagaaattttaaagatggttctgcgttcttgggcacattaaaaattgaaaccaaggacagtgatgagtttatgcgatacttgaaaaagaagaaagttttgtttgaggtacaggaaaatggggcatagttttgttgaattggtggaacaaattatctatccagcagtaaagacaacactgtatatggttacaattgcgacaatattttcggcaatattcggattcatgatcgccatacttttatatgtgacaaggaagtcaggtctacatcctaatgtaggggtatttactgtgataaatacgattgtcaatgtaatcaggtcattcccatttgttattttgatggtctcgattattccatttacacgatttttggttggaacaagtatcggtgaaaatgcggctttagtgcctcttacaatcgcatcggcaccattcatggcaagactatttgaaacaagttttgaaagtgtggatgaagaggtaatagaggcgacaaaagcttgtggagcttccaatattcaaattatattctgggtagttataaaagaatcctttccgcttttagcacaaaatcttacgttggctatgatttctattcttggattttcagcgatggcgggtgctgtgggagcaggaggattaggctcggttgcattgatgtatggatatcagaattttaatgattctatcatgtatgggacggttatcatcttaattatacttgtacaattcattcagtttgtaggaaataagttatgtgattatttgaaatagtggagaaaatttatggagcagataaaagagataccaaaggaaatgctgactccaagagaacggagtgttctatatggaatggggaaagaagtagaccatattccatattctttgattggtacagaagcggcggccgaattgtatggggtggatattcgaaagacatatacggatatagaaacggtgattgccctggaaaaaaagatggtggatgattttggaattggatgcatgagtataggaccacgtttaaagggaattgccgaggcattaggagctagcatgaaatatccgaaaaataatatgtatttaattgaagagccgttaattgcagattataaaatgctagagaacatgcaggttatcaacccttatactgatgggaaaatgcctataatgctcaaaatgatggagcagctacaaaagcaatttggagattatgatattttaaaaagtggtgtttgtggtcctatgacatgtgcgttatctttaagagaggcaggaatgtttttaagagacttaaaaaaacagcctgaagagatgcatcatttgttacagtttagtttagagtgcataaaggcctggatgaaggttgtatacgatgaatttggatgtgtatgcagcattgcagatccagcttcctctatgaatttgataggaaaaaagcattttgaaaatttttctaaaccgtatttaaaagaattggtggtatgggcaaaaagttatatgggaaagagtccttcgattcatatttgtggaaaaagtagaaaagtatgggatgatttaaaagaaattggtttttcagcttttagtgtggataattgtgaggatcttttcgaattgaaattacatttaggtggagaaatggcaatatcaggaaatgttcctccggtagatgtattgaaaaatggagatatattttcggtaatacaaagtgtgaaagaatgtattgaaaaggctgcgaatagccctaaaggatacttgttgagtgctggctgtcaaattcctttaggaaccccaaaagaaaatcttttagcatatatttatgcagcaagaaaatatgggaaagatgcagtgaaagggaagggatgtagaaagataccttaaaggaaattaacttgtctgggcaacaagtactacaaaaaaatagcgcctcactctatgagtggcgctatttttttatggtatttggacttgatttctattttgtaagcaacatcataatttcattacttctgctgatgaatgctgtcatctcttctggatttaacggcttgttgctcagcattgcaagatcatataactgctggcagaacagatttacatgttctccatctttattatttaagacatattgtaccagtggatggtttgcgtttaacacgagggtcacatctgtgccgaacatgccagcatccataccgtacatgttgtacattttcatcatttcctgcatacgacgggactgttcagaaagtgtcaccatagaagcgacattttcatttttcagtttttccactttgacttccagtttttcgttattcagtgccttgcggaagatggctgtgagtgtttcagtgtttgacttaaaggtttcttcctcttctttggcaacctcttctttgaaatggtcagtcaaatctgcatcaatacgctggaactggacattttcattacgctgttctagctgtgtaatgaatggagagtcaatattgtgagtcaggagtaccgcgtcaagaccttcttccttgaacatattgatgtactggctctgctgttgctcatcagttacatagtagatagtcactttctcaggttcttttgcatctgcatcgttgtcagagtgatcagaagtagtttcctctgcggtttctgtggaaggtgtttcctctgccacttcttttgcagggctgtttttctcaatacattcttttaaagtgaggtagtcatggtcaatgtttttgaaaagaatgtagtcgctcatcttatcgcagaatttctcgtcttttaagcagccgaatttaataaatggactgatatcatcccagtacttgatgtaggattctttgtctgtcttgcacattccgcttaatttatctgcgactttctttgaaatataatcagaaatcttgtgtacaaatccgtcattttgcagtgcgcttcttgacacattcagaggaagatccggacagtcgatcacaccttttaacagcattaagaattctggaatgacttctttgatgttgtctgcgataaatacctgattgttatataatttaatcgtaccctcaatggattcgtactctgtgttgatcttcgggaagtagaggataccttttaagttaaatggataatccatatttaagtggatccagaataaaggttccttgtaatccatgaatactttacggtagaattcgatgtagtcttcttttgtacaatcatttggatgtttggtccaaagcggagttgtatcacttaaagaaaccggacgtttgttgatctttactttgtcaacagcaggggaaacttctaccatttctttctcgccgttttcattttctttttcttccattttagcttcttcgtggatccgttctacgatgacatcgtcttcttttaattcttcttctaaaatagtctcatattcctgctctgcatttgcgttggataagaaaatctctaccggcatgaaagagcagtatttttcgataacttcacgggcacggtattcatttgcaaatgcaaggctgtcttcgtttaagaacagtgtaatctctgtgccgactgttgttttattgccatctgtcagatcgtattcggttccaccatcgcatgtccagtgtactggtgcagccccttccttataggaaagtgtgtcgatgtgcacttcgtctgctaccataaaagcagagtagaacccaagaccgaaatgtccgataatctgatcttcatttgtcttatctttgtacttttctaaaaactctgttgcgccggagaatgcaatctgtgtgatatattcttcgacttcatcagcagtcataccaataccgttgtcgatgaattttaaggttttttcttttggatttacaattacctgaatattggctttatagtcatccgggaaagtatattcgcccatgacttccagtttttttagttttgtgatcgcatcacatccgttggaaatcagctcacgaaagaaaatatcgtgatcggaatacatccatttttttataattggaaaaatgttctcactgtgaatagaaagattaccatgttttgctgccatgtataacactccttttttatgattttcatttgatagctatgttcaattccgggaaattcccgcgataactacatattaatactggcaaattgaaatgtcaatagaaaattagcactctttaaagtagagtgctaataaaagtataaaaaagataaagtttttataaaatgaagaaaacaaatttgggaagcaggtacagttttgatctgctgcgttacagtacttcaaatggcatttgcttttgcttgaaaaatcgctgtaccattgtatcccaggcatgttcgagtgatttgtccatcgtaaatgtattcatggaagttccggttacgcagtggagtgtactgccgtcaaaggataagttcaggtaaagcccgcggacatcttcaggagaaaatgaaagtccttcctgtacaagaagacgagaagtattttcgcccgaaaggcagaaaacaaatttaaatccgagcggtgtctttttccctttgatgatggtgtaacagagtgtacgtacttctttccacagggagtactcacgggaagagaagcgggagagggcttcttcggtatcaaaaaaatcttttttcaagtatccatcgaggtggaatgtattaaaggttgtaatgtctccttctataaaaaggaaggcatcgaagatgtccgagaggagcagtttgctcatgcaatcccggacttccagcatatgtagtgcaatcataaaataaaatcacctcctgagtgaatttgtgttttgggtagtatctgcctcaaaaagcagaaggtattaagttgttttcttagccatcgattttttcaacagcaggattccagtaagtaatgtgaatagttcggcaagcgggacagaaatccagattccgttcagacctaaaaagatcggtagaattttcacaaaaataatacttaatacacatccacgcatcaggcagagtgtgagagcataaaccggtcttatcgttgactggaagtaaccgatgaggaacatgttcactccagtgatcaaaaatccgataaagtaaaggcgaacagcagccggcgccagagcaagtacttgtgaatctggattcaggaaaatgtaagtaaacagattcgggacagtaagaccaagcagtgttggtatagcacagatgaacagtgctgtgcgcagtcctaatttacggacatgatcgatccgttcctggaatcctgcgccgaaatttgtagagatgatcggctgtgctgcctgacagattccgtttgagaggcaggtcacaacaattgcagtgttggaaataatcccatagacactgacaccgagatctccctgatagcgcagcagctgttggttgaagaaaaaaattacgattcctgaagataggtcgatcagaaagctggcaaatccacttttgaaaatatcggaaccgaaagaacttcggatttctgaaaaacagaaatgtaagtgattgtgttttccgaaaaaatggatcagcaagatcaacacggtcagaatagagccgcacacagtggcaatcgcagctcctgccattcccatctggcatggatatacaagaatatagtcaaagatgacattgaaaattcctccggaaacaacagcggtcattgcaagttttggcgccccatcatttcggataaaggtttgcagaaacgaagaaaaagcaaagaccggaagactccatgtaatataaggaagatagtccatcacataaggcagtgtgacatcggttgctccgagaaagagggcaatctcttttgcaaaagtgttgcagatgatcatatagatgatgcaggcaagaacatttaacagaaaggaaagagaaaaataggcatttccttttgaatgttccccgtgcccgcggcagatggacatcatgacagatccgccaacaccgaacaggagaccggtgccaaagaaaagattgtagacggggagggcaatatttaatgctgccatcgcgtcggttccgattcctttgccgataataatagtgtctgccaacacataaatagacgttaccattgtaccgcagatcgatggaacaaggtaacggaaaaagagcttggaaataggctctgtcgtaaaattgtttaggttcatgtgcaggtgtctcctttgtaaaattttgccggaaacaaagcagtgtccggcatcactaacagtataacataattgaagaaaaaagctaccagagatttgacttttaaagaaattgccagtatgattaaagtattacgaaagacatccgtatggatgtcggaagaatcatagatgatccgcgtcagaaagatgcacatacagaggatcatctgtgcagaaaaaggaggaaaacagagatggaacagaacaaatatgtggataaattactgaaattgacaaaaggtgcaacatcgcagttccatacggtgttggagacaaagaaacagcttgaggaggctggatttgaggaagtggctttaagagaaaactgggatctgaagcgaggcggaaagtattttatggttcatcatgattctacgatctttgcatttacaatcggggaagaatttgaaggtgaagatgggttccgtctggctgcatgtcatggagattttccaggatttcgtatcaaaccaaatccagagatcgtgacagagggatatgtgcagctgaacacagaggtatatggtggagtgaacttagcaagctggctggaccgtcctctctctatcgcgggaagagtggtattgcgctcagaggatgttttccatccggaagtccgtttgattgattttaagcgtccgttgcttacaattccgaacattgccattcatttacagaaggagatgaatcagggggtagaactgaaccgtcagacacagatgattccgcttcttggaaaacttgcagaaggtgagaaaaaagaaggatattttgcaaatctgctcgcagaggagatgggcgtgaaagcagaagatatcctggaatatgaactgaatgtttataattttgaagaaggttgtctgacaggggcgaaagaagagtttatttctgcgccgaggttagataatctgacttctgtacaggcacttgcaactgcgatcatcgatgcagacagaacgaaaggaatcaactgtgcgatcgtctatgatcatgaagaaattggaagcagaagtaagcagggagcacagtctacgctgatcgtgacaattttaaagaaaatctatgcagctcttggatattctgagacggcgttttctaatgcgattatggatagtcttttgatttcagcagatgtgagtcatgcgatacatccaagctatgcggcaaagaacgatccgacaaataaagcaaaattaaatgaaggattttgtatcaaggaggcatgttctcagggatatgcgacagattctgaggcgatcgcaatcgtgcagcagatctgtgaaaaagaaggaattgcttatcagaaatttgtcaatcgttctgacggaagtgcaggaggaacattaggttctatcgtttctgcaattcttccggtgcgtacagtggatatgggaattccgatgtttgcaatgcactccagcagagagtttatggggagagaagatcaggagagccttgtaaaatttatgacagcctatttttcactgtaaaaaaacacatgaaagaatgttacataattgtaatagaaagaacagacatttgtaatattataaatttataatactattctaaagcgtgtgttcggaggacaaagagtagtagacagattttgacagagtgtgtctggagatggattttgcagagtcgtgcatgaacgttttcgggcacattttgtatgtctaaaacggaatagcgctagaagataaaagataaggggtaatcagatgagaaaggatgtaagaaaaattgcgatcggaggcatgtgcgtgcttaccggtgtgattctcatatttggaatcaaaaaggggataactgttctgaaaacggagaagacagagacaaaaaagggtgtggaagtgatcaggaaactggagcaggcagatatttcacagatcgaggggaagatattggagttggagagaagtgagatggaggcgaatccggaactttacagtcagtcaatgaaagcaagattttccaatgcacttgtgttaggggattcgatcacagaaggatttgtggaatacgattttctgagagagtcttcagtcattgcagagcttggaatgaaagtgacagatgtgacagagaaacttgatacgatccgaacactgaatccacagactgtttttttatcttacggaatgaatgatattgcagtaaccggtggagatgcgaaagtatttaaggagaattataaagaagtactggaggatatcagggagatccttccaggtgctgcaatctatattaattctatctttccggtacagcagatgaagatagatgagtcgcctgtatatggatcattagatacatttaatcagactctgcgggaactggcagaggaggaaggcgtgacatttattgataatacagagattgtaaaagaagaatattatgagccggatggggtacatatgacttctgagatctatccgctgtggcttgtaaatatggcggaggtggcaggtctatgatgaggaagatccacagcagagagagaaagaatggactggatgctatttttattacgcagatgatactgatcggaatattggttttgtacgttgcggtactgctttttagaaaaggtgagagtgataccccgtttgcagagatggagcaggcggtggaaggagtactggataattctgatatgaaagaagccgatcataaaatgttccggcgcaattatcggttaaatgcaaatgattatgatggagtaatgctctggtttcgagaggggacaatggaagtcgatgagatacttgtcgtgaaactgaagtccaaagagcagtccgataccgttgtcgaagctatcgaagcgcgaaaaaaatccaggaaggagagctttcagggatatggggcgagtcagacaaaactgattgaagattctattatagatgtaaggggaaattatattctttttgtgatcaaggaagatgcagaaaagatcgatcaggtatttcaaaaagctttgtagaagcgaaaactttctgtcggatggggacgaaggtacttttcaggagtttctgaataagaagatgggatgaaaaagaatataaaaaggggacaaaagaatgttatttagtagtatcgtttttctatttacgtttttgccggtcacgctgcttgtgtactatcttgtaccaggcaggctgaaaaacatcgtgcttctgcttgcaagccttgttttttatgcgtggggagagccggtatatgtgattttgatggtgctatccatcttgtttaattatgtgtcgggaattgatattgagcggaatttagagaatccatttaaggcgaagcagagtctggttatcgcagttgcagtgaatttgctgattcttgggctttttaaatattatggattcctgatagagagtctaaatgcggtattgccggtagaactaccttataaagaactggcacttccaattgggatttcattttatactttccagacattgtcttatatcattgatgtatatcgcggcaaggtacaagtacaaaagaatctgatttcctttggcgtgtatgtgacgatgtttccacagctgatcgcaggaccgatcgtaaagtattcagatgtggagatgcagctgcgggatcgaaatattacgatggaaaaatttggagatggtgccatctattttgtgcggggacttgcaaaaaaagtgctgattgcaaatatgacagggatagtctttacgaaagtatcggcaatcacattttcggagatgtcggttctgactgcatggattggatgcattgcttatacatttcagatttattttgatttcagcgggtattcggatatggcagttggtcttggaaagatgctcggctttgagtttatgaagaattttgactatccgtatctgtccaagagcattacagaattttggcgcagatggcatatttcccttggaacatggttccgggaatatgtgtatatcccgttaggtggcaatcggaaagggaaagaacggacgattcttaatctgatgatcgtatggtttttaactggcctgtggcatggcgcgagctggaatttcgtgatgtggggaatgtattacggaatacttttgatcattgaaaagtttatgatcggggatcggcttgagaaagttccggggatgttcagacatttgtatagccttttgtttgtgatgatcggctgggtattcttctttagtccgacacttggatttgcgtggaagtatctcggcgtcatgttcggagtcggagcaaagactgtagtggattctatggggatttatctgcttattaccaatcttgcattgtttgcgatcgcagcagtcggttctacggcgaaagtgcatgagatctttggtcggatcgtctatggaggatataaggtgcgggcagttcttgcatgtgcgatctatgcaggaatgttcctgctatccatcgcgtatcttgtgacggaaacctacaacccatttttgtatttcagattttaaggggagacggatgaatagagtaaacagaaagagaagaaaggtcagactttggatggcgcttggatttatttcctgtatagcactgttagttctggcggatgggattacaaaggaaagaaaattttctgaggaagagaatcggatgcttgcaacaaagccgaaggcatcggtggagactgtcatgagtggaaaattcatgagtcagtatgaaaagtacaaatcagatcagtttcttggaagagatttctgggtaagcttgaagacaaaggcagatctgcttcttgggaaaaaagattccaacggggtttttaaaggagcagatgggtatctgctagaggagatcagcgtgcttgatgaagcctcttacaaggaaaatatggatgcagtgacagcatttgctgcgcgctatccagatttgaaaatgcatatgttgattgcaccgaatgcggcaaatattttaaaggagaaacttccggcatttgcagcaacagaagatcagaatgcacagttaaagaggacagaggagattgtttcagcggcgggcattcaatggattgatgcagcaaagacgttaaaccaacataaaaatgaagaaatttattatcgtacagatcatcactggacaacaaaaggggcatattatgcatttcaggaggcggcaggagacctggggattttgcaggaggagatgacagcatttgtaccgcatacggtcacagaagagtttaatgggacactgtcggctacaagtggttatgagcggtcaagaagagagaacattgatatttatcttccagagaaaaatgatacagaggttgttgtcaactatgtggaggagaaggaaaagagtgcttccatgtacagttcagagaagctggaagaaaaggataagtatggaatgttcttaaatgggaatcatgcattggtagacattaagacaacttcggggaagaatcggagactgttgatcttaaaagattcttatgcgaactgttttgtgccgtttctgacaccatattacagggaaatcgtgcttatagacccgcggtattattacggggatctggatgatctcattgaggaagataggattacagatgtactgtttttatacaatggaaatacgttttttacagacaataatttaagtggagtgttagcgagtgagtaatcagatagagagagaatttgacgcgccgaaagagtcggtgcggttaaataaatttttaagtgaggcaggtgtctgctcgaggagagaagcagatagattgatcgagagtggaagagtcactgtcgatggcagacgggcagagatgggaatgcgtgtcacgaaagatcaggaagtgtgcgttggaaagaaagtgatacagaaaaaagaccggatggtcctgcttgcagtcaataaaccgaccggaatcgtctgtacagaggaaaaacgggagaagaaaaacattatccgttttttaaattatccaacgaggatcacctatattggaagacttgataaggattccgaagggcttcttcttatgacaaacaacggcgatattattaacaagatgatgcgtgcgggcaactgtcatgagaaagagtacaaggtgactgtcaacaaggaagtgacaaaagaatttgttcggaaaatgtcagaaggggtaccgatcttagacacggtgacaagaccgtgcaaagtagaaaagactggaaaatataaatttcgcattatcctgacacagggattgaaccgacagattcgcagaatgtgtgaatattttggatatcaagtgacaagattggagcgggtacgggtgatgaatatcgaacttggaaatctaaaaagtggagaataccgcgaagtgaccggaagagaactggacgagttatatgaacaattgaaaggttcttccaacaacacagtatatgaggagcagtagagtatggaacagaaaaagcagagaatgcaggaactggtacagctgttaaatcaagcggggaaagcttattatcaggatgcaaaggaaattatgagtaaccatgagtatgacaggctgtacgatgagttacttgtactggagcaggaactaggaattacgatggcgaacagcccgaccgtcaatgttgggtatgaagtattgagtgaacttccgaaggagcggcacgagaagccgatgttatcacttgataagacaaaggagacagacagactgaaagaatttgtcggagagaaaaaagcagtgatctcctggaaacttgatggacttacaatcgtgctgacttatgagaatggagaactgaaaaaggcggtaacgcgtggtaacggtgaggtcggagaagtaatcacaaacaatgcaaaagtgtttcagaatgtaccgcttcggattgcttaccggggagaattgattcttcgaggggaagcggtgattggttatcgggactttgagaagatcaatgaagaaatcgaagatgtggatgcaaaatacaaaaatccgagaaatctgtgcagcggctcagtgcgtcagctgaacaataagattacagcgcgaagaaatgtgcagttttacgcattttcgcttgtcaaggcggatggagtggacttccaaaattcaaggaatattcagcttgagtggctgaaagagcagggatttgatgtagtggaacactatgaggtgacaaaggatactctggaagaacgtgttcgattttttgcggagcatattgaagagaatgatattccgtccgatggacttgtactcacttacgatgatattgcttacggacaatctcttggaagtacagcgaagttcccaagagattcttttgcgtttaagtgggcagacgagatccgggagacaactttgcgggaaatagaatggagtccgtcaaggactggactgatcaatccggtggcaatttttgatccggtggaactggaaggaactacagtcagccgtgcaagtgtccacaacttaagcattatggaagagttagagcttgggatcggggacacgattcaagtatataaggcgaatatgattattccgcagattgcaggaaatcttacgcgaagtgggatggatccggtgccggaatgctgtccggcatgtggcggtgagacagagatccgtcaggtcagcgatacgaagacattatactgcacgaacccagagtgtggggcgaagcatatcaaggcgttttcactgtttgtgagcagagatgcgctcaatattgatgggttgtctgaggcgacactcgagaaatttatcacacgcggatttatccaccatttctctgatatttttcatctggagcaacatggagaggaaatccggtcgatggagggatttggggaaaaatcttacaaaaaccttcaggatagtattgagaaagcgcggacaactacactgccgaagctgatctatgggcttggcattgcgaatattgggctttccaatgcaaagatgatctgtcgtgcatttgattatgatgtggagaaaatgcttcaggcagatgtagaagcgctgaatgagatccagggagtcggtgatgtgatcgcgagagcttttgttgattattttgcagtggaagaccatcgggaggaatttttcagactacttgaggaagtgaagattccagaggaagagacgactcaggaagaacagattttcgcaggaatgaactttgtgatcacaggaagtgtggagcattttgcaaaccggaatgaagtgaaagaggtcattgagagcaaaggaggaaaagtgaccgggtctgtcacatcaaagacgaactggttgatcaacaatgatgtggaatcaacatcttcaaagaataaaaaagcgagggaacttgggattccaattatttccgaggatacatttttgaagatgattggaaataattaaggagaatttatagattcttaacttgtttcagcgaaacgactacgatataatagacccatatatggtagaaagaaggaaaaagtatgtcagaaaaagatttgacgatagacagtgagatcatagatgagattacagaaggaaaagaagacaaacatgtggagaaacatggaaaagagcatccggatgtgccggacgatgcaggatatgaaaagtattgttcgctttgcaaccgcccggagagcattgcggggaagatgattgagcttccgaacaatattacagtatgttctgactgtatgcagaagagctttgatctaatgtcgaatagtaattttgattatagtaagctgatgaatatgccgggcgttcatattatgaacatggcagaacttgagaatatgatgccaaaggcgaagccggtcaagaagaaaaaagaaggcgagaagaaagagcctgcgctgaatcttaaagatattccggcaccgcataagatcaaggcaaaattagatgaatatgtggtagggcaggagcatgcgaagaaggcaatggcagttgctgtctacaatcactataagcgggtagcgacagatacgatggatgatatcgagattgaaaagtccaatatgttgatgatcgggccaaccggaagtggaaagacatatcttgtaaagacgcttgcgagacttctggatgtaccgcttgcgattacagatgcgacttctttgacagaggccggatatattggtgacgatattgaaagtgttgtctcaaagcttctggcagctgcagacaacgatgtggagaaggcggagagagggattatctttatcgatgagattgacaagattgcaaagaaaagaaattccagccagagagatgtcagcggggaatctgtacagcagggaatgttaaaacttttagagggaagtgaagtggaggttccggtaggagcaaacagcaaaaatgcaatggtgccacttacgactgtgaatacgaagaatattctgttcatctgcggcggagcattcccagatcttgaggagatcatcaaggagcgtctgaacaagcaggcgtcaattgggtttaccgctgatttgaaggataagtggaatcacgataagaacatccttgagaaagtgactgccgaagatcttcgaaactttggaatgatcccggaatttatcggacgtctgccgatcatctttacacttcagggattgaatgaagagatgttggtcaagatcttaaaggaaccaaaaaatgcaatcttaaagcagtatcagaagcttcttgcgcttgacgaagtcaagctagagtttgacgaagcagcattagaggcaattgcgaagcgtgccatagagaagaatactggtgcccgtgcgcttcgtgcgatcatcgaggaatttatgttggatatcatgtatgagattccgaaggatgataacatcgggcaggtgacgatcacaaaagaatatatcgaaggaaccggaggtcctgtcatcacactcagaggacaggcgctgcttacgggagaatagagaattcaggacattgaagcatattcagtgtcctgtttttatatgatgtaaagattgacaaaatttggaggttatgatgccggaaacgatagaaatatgcagaagcagagcgctgtccgaagaataccgggattttatttttgaaagtaaaagaccatattttcttaatggaatttcaggtgcagaactctgtgagcagtatgtcgggtatgaatatcacgttgtatatattgacaagatgtttgcagatccgatgtctttggaccggtttacgtatggggtaattccgaagtgttatactcttttggatacagaagcgctaaatgaggcagggatcagccagattcagaattatcctacactgaaattgacaggaaagggcgtgatgattggatttattgatactggtatcgattatcagaatccaatttttcgaaatcttgacggaaccacaaggattgcgggaatctgggatcagacgatccaggagggagctcctccccagggatttgtctacggaacagagtatacagaggagaagattaacgaggcgttacaaagagagaatcctctggaagttgttccatccaaagatgagaacagccatgggacatttcttgcgagtattgcggcaggaagtgaaaacattgaaaatcgatttaaaggagctgcgccggaagccacacttggcattgtaaagttaaaaaaagccaaacaatatttaaaggatttctatttgatcggggacgatgcagagtgttatcaggagaacgatattatgcttggaatccggtatctgaccgatctggcaaagaagaaaaaaattccattagttctgtgcattgcccttggaaccaatatgggggatcataatgggacttctccgctttgcaacttgctggagatatattcctacactgctaatatggggattgtgattggtggtggaaatgaagcgaatcaaaggcatcattattatgggctgatagaaaatatggcggacagtaagaatgtggagatccgtgtggcggaaggtgtaaaaggattttcgctggagttgtggaccgagattccgaatgtgtttgcggtttccattgtttcgcctgccggtgagaaaattccccttgtgccagtgagacagggaatcggaacggtgctaaactttgtgtttgagagaacgagtgtctatttggattataggctgttggtggagcggacgaattccgaattgatcctgatgcgttttgcggatccatccccgggaatctggagaattgtggtagaaccacagcagctggcggatgggattttccatatgtggcttccggttgcagaatttttgaccggagatgtatattttctgcagtcaaatccagatgctactattacagaacctggaaatacaccggatccgatgacggttgcaagttacaatggggcagataagagtattgccatcgactcgggaagagggtatactagaggtggaaggctcaagccggaattcgcggcgcccggagtagatgtgacgggtgcagtaagccatgggcagttcacaaagaggactggatccagtattgcgacggggattactgccggagcgacagcacttctgtttgagtggatagtttatcaattgggcagaacgaatattgactcgatccagctgaagaatctgatgattctcggtacagagcgtaaagacacggaagtgtatccaaacagatcgtggggatatggcagcttgaatctctacaatacgtttgaacagcttcggacattttaggatgtagatcgcacaaactacatgtgtgactgcattccgatacagaaaagaagagcaaaggacagaaaggaagagcgcgatgaaagaattttttgaagatttaggaaaatttattacagagacagcaggaaatgtagggaaaaagacggaagaggttatggaagtacagaagctgaaaagccagatccgcagtctggagcgcagcaatcagggagatctgacagatcttggaaagatcatttatgaacgcttccgaaaagaagaggctgtagatggagaactggaagtaatctgcgaggaaatcagaaagagaagaatgatcatcgttgcctttgagaagaaacttgcggatatgaaaggcgtgaaagaatgtgagaattgccaggaactgattgagaaagatatgaagttttgtccgcattgtggagcagaggtgaagaaagaagagatgccgcaggaatgtgaagatatttttgcggagagtgatgtatcggaaagtgctaaaatggaagagacaacagaagaagtgattgaggatattatggagaaggcagcagatgtgacgaaagtatctgtagagcatgtaaaagatgcagcatctgagattgctgaggatgtcagagaatctgttcatgagatgaaagaacatataaaggagagcgtggaggatattcgagaatagcgacacgcagagggaaattatgatttatttactcatagcaggtagtttgcttgccttggatctgggaataaaatggtatgtggagaatcatttcacggaagcggatatcagaagggcggcaggtgggagaatcctgctcagaaaaagctataacagtgggatggcaatgaatttgctggagaataggccgggattcgtaaagtggttgacggcagggcttggagtgtttcttttggtgtatgagctgtgtttgttggcaaagggcggaagaacagtggaaaagaccggatgggcgcttgttcttggaggtgcgtgcagcaatttatatgatcgttttcggagaaagtatgttgtcgactactttagtttccggtgcagatggaaaaaaatacagaatattgtgtttaatttaggagatctatttatttttacaggaagtattcttgtagtatttgcacaaatattccggaagaagtaaattgacttttggaatttaccgcgttatactgaataacagaagagcatttgcgaatgataatttttatgatttgcaaatgctttttcgggtattgggggatttggtaaaagaaaataagatcatatcgacagggaaagaaaaagcaggaggcagagatcatgaagagaataaatggaaaagaactggcaattgatattttgattgattttgtaggagggtttttgattgccgttgggatttataactttgcagcaaaagcacagtttccgatgaccgggttttcaggaattgcattgattttttatcatctatttcatataccgatcggtgcaatgactattttgctgaatattcctgtagtctttctctgttataaattgcttgggcgtacattttttcttcgttcgctaaagacaatgatcatttcttcgatattgatggatgtggtggcaccgatgctgccagtatatgagggagatcgaatgttggcagcaatctgcacaggtgtattagccgggcttggatatggaatgatttatatgagaaactcttccacgggaggtgcggattttgtgatcatgtcggtaaaagcatggaaacctcatgtatctatcggtcagattgcatttgtgatggacgtactgatcgttttgatgggaagttttattttccgggacgtagaagggatcatttatggcttgattgtgacttatcttctgtctgcggtagtcgataaagtaatgtatggaattgatgccggaaagatgacattgatcgtgacagattatcctcatgagattgcggcaaagattgatgagtatactggaagaggttctacttttctcagaggaaggggaagctattccaaagaggagaaagagattgtaatgtgtgcctgcaataataaacagatgtacacaatccggaagatggcaaaagagattgacccgaaggcatttattgtgatcatggagtcaaatgatgtggtcggggaaggatttaaggagaattagactaagaagaaaatatatttacatccgaaaatggacgaggtttgtaaaaaagaaagaacgcattgcaaatgagaagtttcatcttgcagtgcgttcttttctacatcaaaatattattcggcatatttctgaattaattttacgatcatatctgtggcaagatccatgccttcggcggtgatatgttcatatggtccgtgatagccgtagcctccggttccaaggttcggacaaggaagtcccatgtagcttaaacgacatccgtcagttcccccgcggatcggtgcgacatccggtacgatatcagcaagtctggcagcttccaccgcattatcgatcaggtgcatacaaccctggatcacttctgacatattccggtactggtcatggattgtcagtgtgacagtaccttctccccacttcgcattgagttgttttgcaatcagatgcatagtatttttacgcgcctcgaaaaagtgaggatcgtgatcacgaatgatgtattccagttttgcgttggcaacatctccggacatttcacagagatgatagaaaccttcatatccttcggtaccgcgcggcgtctcgcaggatggaagcattgcattgaattccattgcaaccagtgcggcattgatcatggtatctttactggaaccagggtggacattgaatcctttgatctcaacgatggcttcacatgcattgaaattctcatattggatctctccctccggaccgccatccatcgtgtaggcgaattctgcatcgaagtcttttacattgaaatggttgacaccggatccagcctcttcatcaggagtaaatgcaacagagatttttccgtgagggatctcttctttctgaatccgctctaacatggtcataatctcagcaatccctgctttgtcatctgcaccgagtacagtcgtgccgtccgttgtgatcaatgtgcgtcccttcagggatggaaggtgcgggaagttttttacagacagtgtgcggccgcttgtaccgagcacaaggtcttccccgtcataattttctgtcacgatcggggtgatatcatggtcgcagaagtctgataccgtgtccatgtgtgcgacaaatccaagctttgtcttctcttcatatccttttgttgcaggaagagaagcgtatacaaagcacttttcatcgacagaggcatccgtcagccccaattcttttaattctgttacgagaagatgtgccaggtcaaactggcaggaagtagttggaaccgttgtgcttgtatgatcacttggtgtacggacaactacatactttaataaacgttcatatgctctcatgttaaaaaatcctttctgtgtgattggtcaaaaaggcaccgaaagcaggaaagtgcctgcgatgcgacttgaccttgcataagaacagtatagcaagtagggaaagagaagacaagtaagaatgaaactttatgcttgatccataccgcaggcggtggcggatgcaatgaggcagcgatcattcataacggcatcatagaagcggaatccaccggagaagttgtaagcacgatatccatttccttccagaattctggtggcgatatagcttctaagaccactttggcacatgacataaactggtttctcttttggaagttcttttaggtgctcgcgcagaacatctacagggatatttgtaaatccagccacatgtcctctttcgtattcctcaggggttcgtgtatccagaagaatagcgctgccatccaggggaagcgttttaatatcttccagatggaattgtgttaacgtaccatcagaaatattttctatcataaatccagccagattgactggatctttggcagaagaataaggaggtgcataggccagatctaattctgccagatctgaagatttcattccggcatgaatggcagtagcaagtacatcgattcgcttgtctacaccttcatatcccacaatttgtgccccaaggatccggtaggtttctttttcaaatactactttcatcgtcataactttccctccgggataatagccagcatggctcataggagagagaattactttgtctacagccagaccggcttttctggcattggtttcatttacaccagtgacagcggcagtcatatcaaatactttaatcacagaactaccctgggagccaggataagaactgttttttccacagatatgctctgccgcaatacgtccttgcttgttggcaggtccggcaagagaaattaaagtatcttgtccggtgacggaatgttttatttgtacggcatcccctacagcataaatatcaggtgcggaagtttgcatatgcgcattgactaaaatactgtcttttataccaagttccagaccggcatttttagctagttttgtgtccggagtaacaccaatagctaatactaccatgtctgcacaaagaggttcctcttcttttaaaagaacacggacaccatctgtagtttcctgaaatccttctaccgtatgtccaagagccagttttactccatggttacgcatttcattatggagaaaggcagccatatctgaatcaaacggattcatcagctgctttggtcgctgtacaatggtgacctccatgccaagctcacggagattttcggctaattctaatccgatgaagcctcctcctgccaaaacagcagactttggttggtttttctcaatataggttttgatccgcagggtgtcttctacggttcgcagtgtaaagagtttgtcgatatctgtaccaggaagtttgggctgggttggcttggcaccaggagaaaggatgagcttgtcataggtttcctcaaattcttctcctgtttccagattctttacagatactgcatgacgttccggatgcagggaggtaacttcgtgatgtaccttcatggatacgcggaaacgagaaaggaagctttctggtgtctgtaaagtaagaaggtctgaatctgtaattacatctccaatgtaataaggaagtccacagtttgcgtaggaaataaatccagagcgctcaaagacaatgatttctgcatgttcgtccaatctgcggagtcttgcggcagcagttgcaccgccagctacaccgcctacaattacaattttcattttatttttccacctttcctgtataggaatcgatgcctcctatattttttacattcgtataccccatttttttgagtaagataactgcttgacgacttcgggctcctgaatggcagtaaacgaatacaggtgtctgaagctgtgcagcaggtgttccttcgtataaggagcgtagagggacatttttgcttccgggaatatgtccttctttgtattcctcaggggttcttacatctaatagtacgccttcttttgtattgtgaaaagctagcaattcctgattaatatcaggtagtttaaaaaaatcgaaaaaactcataatgttacctccttgtcacagtatattcgttccaatcgttgatactgctgaatgatacaatcgttggatatcctaaatctgccagtttttgaaaagctaaaaaataggcagagcatctgtttctttttcataacaaaacctttaaaagttgataaaaatactataatacagaaaaaagaaatattctgtgatgagattacaaaaaaatattaaaaatgttagcactcgtctattgataatggaagtcgatttttgttctgtcttgtgtatcccaaaagtgcctgttttacaggctttccggggtatcagtcattttgtctggtattgtaaagcagtgtcagatttgtcgtaaatgtcgtaaatttgtggtcaaaaaatgatgagaaatggagagtgctaataaaatgaaattaacgtatacgaatgtaaatggatatctgatcccgaatctcacctataaatccggtgagcagatggagcagcttggcaagtatggttttcttcgcagagattatctgaagaaccatcgaaattcaacttatcaggtgatgcttctgcaggacaccattggagagcatcttctggaagtggatagggcagccagagaacgggaagaaatgattctgaaacagttggaagaaaaagaaccattggcggataaagaagcagatcagatggcctgggtaagagctgctaatcaatacagagcgattgcggaagagattattttaaaggaactgatctatgtttaacaaagttgaagctggtaactgaggattgaacaggtaattggacagattaaaaatttattgaaaaaagaataaaatgtttagagaaggcgtgagtgatagagatattacttacgctttttcttttgaactgaaaaggaggatgggagcatggcacagatttttcgtgtagagagaactaagaattttacggtaatgagtaatcaccatttcaagaataagaatctgacattgaaagcgaaaggtctattatcgctgatgttaagtttgccagatgactggaattacaatatgcaaggactggcaacattgagcagagatgggattgattctgttcgttctgtaattaaggaaatttctatctccggacatcagaaaatagtaaaaccagatatggtaaatccctttttgtcatgtcacgaatttgatattttgagttcttattttgtatattaatgtgttctgatttgatattcttttatgaaagtaaagatagaattgcagatagtaggaatggctgcaatttgtttataataagtgtgataggagaatgagaagtatgaaatatggtttttttgacgaatcgaaaaaagaatatgtgatcacaagaccggatacaccggcaccttgggtgaactatcttggatctccagaatatggagcaattatttctaataatgcaggtggatatagctttgcaaaatcaggagcgaacggaagaattttaagatatgtcttcaatcagtttgaccagccgggaagatatatctacttaagagatcaggagagtgaagattattggtcagcttcctggcagccggtaggaaaagatctgaattcttataagagcgaatgtcatcatggtacagcatacacaaagatgatggctgattatagcgagatccattcagaagtaagatactatgttccgctggatcagtcttatgaagtgtggaatcttgcagtgacaaatacctcggatcgcatgcgcaagatcaatgtaacaggctatgcagaatttacaaacaacagcaattacgagcaggatcaggtaaatcttcagtactctcagttcattacaagaacagtgttccgtggaaaccgtgtgcggcagctgatccatgccaatctggatcagctggaagatggaaaagatgtggatgacaagatcgttgttgaccgtttcttcggacttgcaggtgcaaaggttgattcctggtgtggaagcagggaaggtttccttggaagatatcatggatacaacaatccggtcggagtggaagatggtattttaaattgtgaaggaaattataatgaaaatggatgtggagcattagctacaatcctgactttatatccgggagagacaaaagaaatagcatttcttgttggtatgaaagaagatgttgatgcagaaacaatcatgtctcgttatgaggattgtgaaacaatctgcagaaatgaactggaagaattaatccagtactggcatggacatctgtcccatttccaggtgaagacaccaagcgaagaatttaatataatgatcaatacatggaatgcatataactgctttatgacatttatctggtcacgtgctgcatcctttacatattgtggactgagaaatggatacggttatcgtgacacagtacaggatatccagggtgtgatccatctggcaccggagatggcagtagagaagatccgcttcatgctttctgcacaagtaaataatggtggagggcttccacttgtaaaattcacacacaatccgggacatgaggatacaccggatgatgcttcttatgtgcaggagacaggacacccggcttatcgtgcagatgatgcgctgtggctgttcccgacagtatacaaatacatttccgagacgggaaatctggaatttatcgatgaagtgattccgtttgcaaacaaagaagaaggtaccgtgtacgagcatttgaaacgtgcagtagatttctccatgaatcatcttggaaagcatggtatgccggcaggcctttatgctgactggaatgactgcttaagactcggaaaagatggagagtcaaccttcgttgcattacagttctactatgcaatgacaattttgaaggaatttgctgagtataagaaagacacagaatatctgaattatctggaggaaagtcagaagaagctggaaaaactgatccaggatctctgttggaatgaagaccgctttatccgtggcttcacagaggatggtgaagtgatcggacagcgcacagatccggaggcaaatatgtggctgaacccacagagctggtctgtgatcagtgggcttgcaaatgaagcgcaggcagatcttgcacttcagaatgtatatgacaaactgaatacagaatatggtgcaatcctgatggatcctccgtatcatgcgcatgcatttgacggtgcactggctgtgatctacaatgccggaacaaaggaaaatgcaggaattttctcacagtctcagggatggatcattcttgcagaggcgcttcgtggacacggagagagagcatttaactattttattgaaaatgcaccggctgcacagaataatcgtgcagagatcagaagacttgaaccatactgctatggacagtttacagaaggaaaacacagcccgaacttcggccgttctcatgtacactggctgacaggaacagcatctacggttatggtgggatgtgtagaaggaattctcggaatgcggccagacttctatggactgaagattgctccgtcagtaccgaaagagtgggaggaatttgaaatcgaaaaagatttcagaggttcacatttacatatcgttgtgaaaaatccggggcatgcagagtcaggatgtgaaaaacttttcgtaaatggagaacaaatgaaagataattatattccacaggagaagttaacaaagacaacagaggtagaattattcctttcttaaatgaaatgacgagggactggacatgagaaaaatcaattttacagataaaaacggaacatttacgattacaaatccggaaaattatagtggactttacttaccactggcaggagaagaaggtctgaaatccagtattacaccaactttggggggagatagtaaaacggaccagaatcatttccttctcgaacctgtcagcattgaaaaccttcacaataaccgtggcaccagaaatttctggtgtcgggtagaaggaaaaggctactggtcagcatgtggagtttcagcggagcaggagtttgataaatatacagacagacaggatgaaagcactctggaagcaggaatgatgtggcagaagttgacaagaacttcaaaaaaatatgatcttcagtcagaaatcacatcctttgtttctattgatggcacaacagagatccagctgatcaagattacaaatctttcggaagaagaacaggaagtaacaccgatcgttgccattccggtttatggaagaagcgcagataatatccgcgaccacagacatgttacatcacttcttcacagaatcggcacgaaagaatgtggcgtagaagttacaccggtattatcctttgatgagcgtggacatcagaaaaatgatacgacttattttgtatatggttttacagcagaaggaaatgccccgaaggagttttatccgactgttgaaagctttattggagagggaggttctttcctgattccggaagcagtacgtgtagaaaaaacgggatgtaccgcaggctgtcatctggaggggaaagaggctgttggggcattcaggtttgaacgcagaaaattaaaagcaaatgaatcaatagagtatgttgttcttgccggagcaacgggagaaaaggcttccatttcaaaaatctgtactttatttggtacgaaggagcaagcggaaaacgagcttgccaaagtgaaaaagtattggacagaaaaagtaaatgtagagtttgaaaccggtgatgaagctacagacaattatctgaagtggatttgcttccagccaattttaagaagaatttatggatgttccttccttccatatcacgattatggaaaaggaggaagaggctggagagatctctggcaggattgccttgcacttctgattatgaatccctcaaacgtccgtcagatgatcgtggataattatggcggagtaagaattgatggaacaaatgcgacaatcatcggaaataagcagggtgagtttattgcagacagaaacaatattacacgtgtctggatggatcatgcattctggccatttgtaacgactcgtctgtatctggatcagacaggagatatggaggttctgtttgaaaaggttccgtattttaaagatttgcagtctatgagaggtactgcacatgataagttttggaacagcgaatatggacagaagcagaaaacagaaagagaccacatttatttcggaacagttttggaacatattcttttacagaatctgtgtgcgttctatgatgtaggagagcataatgaaatgcgtcttcatggtgccgactggaatgatgcactggacatggcatgggagaagggtgaaagtgttgcatttacctgtgcttatgccggaaatttgagaaatattgcaaaaacactccgtcagttggaagaaatcagtggaagcagcaagattgaaattgcacaagagatggaagatcttcttgcaggaagcgtggaactgtatgaagatgcagcacgtaagcaggcactccttgcaggatacgcaaagaaatgtgaacataatatcagtggagacacaattgttgtaagactggatcaacttgctgctaatcttgagggaaaagcagactggatgatgaaaaacgtccgtgccaacgaatgggtgaaggatggagaagatggctggttcaatggctattatgataaccatggcagaaaagtagaaggcgttatggatgaaagcgtgagaatgatgctgaccggacaagtatttgccattatgagtggaacggcaacagaagatcaggtggaatctatctgcaggagtgcagacaagtatctttatgatcagaaagccggcggataccgtttgaacacaaacttccatgaggaaaaatttgatcttggaagaatgtttggatttgcttatggcgagaaagagaatggagcagtgttctcacacatggctgttatgtactcaaatgcattgtaccagagaggatttgcaaaagaaggaaataaagtacttcaggcacttttagatgcagcaatggaatttgataacagtaagatgtatcctggacttccggaatattttgataatcagggaagaggcctctatgcatatctgacaggcgctgcaagctggtatatgcttaccatgatcacagaagtgtttggggtgaaaggagattgcggtgacttgaagatcgcacctgcacttatgccggaacagtataatcaggatggaaaagcagtacttaagatgacatttgccggaaggaactttgagattatattctataataaagaaaagaaagaatttaatcagttgaagatccggaaagcagcttgcgatggaaaagcattagaaataacagctgaaaggtgtacaatactttcaaagagagagattcagatgctttcagtgaaagagacacataagattgaaattgaattagtataatcgacagattaaaaaaagataaaaatactgtcagaaagagaattgctttctgacagtattttttgtgggaaaatctgagaattcttctgagaagaattctgatgttaccacatgcttttatagtatttgtcccggtacttctttggggtgagcccggtaaagctctcgaatgtctggatgaagtgactctgtgaagaaaaagcaagataatttgcgatatctacaattgatttatctgagtatcgcagcagatgagttgctttttctatcttctgctcacggatataatcgctaacagagactcccagattctgcttgaaaatgcgtgaaagataattcgtggaaagttcggtgtggtcagcaagaacctgaatcgtgattctttctttgatgtgactgtaaatataatcaacacattgcataacgggttttgataaaatggaactctttttctgaagaatcatcttacctgtaaaatcctttgccatctcatggtgaagatctgcaacctgacggatcgttgtgcaggaatccatcttcagaatatagaagtcgctgagcctgtaagcctgctctggttcgagcccaccgtcgatacaataacgggtcaacattgcagcagtgacaacaaagtggtattttatattagtaagcgcattacgggacagaacgcccgttccttccaggcgaataaattcatcttcggaacagtttttaatgactgcttccatgtcgccggagcgtacagcattatagaaagaatattctacagttggtgatctgtgaagcgtttctaattcgctgttttcgagttctgtattgtaccattcattagataaagccataaaaaatctccttttttatattataacacgaatttgacattttgttaagataaataatataatcggaggaaaaaagatggtatatttagttcaacaacaagaaaagcatagcagagtgcttagataaaggaggatttataaatgaaaaagagagttgttgcgattcttatggcaacagtagttgctgttggattacttgccggatgtggaagcaaagggggaaatggcggagaggccagtacagaagaaggaaaggtaattaacatttattcttggaatgatgagttccgtgagagactagaagctgtatatcctgaagttgagtcaacatccaaagatggaactgttacaacattgaaagatggaacagagatccactggatcatcaatccaaatcaggatggtgtttatcagcagaaacttgatgaggcacttatgaaacaggcagatgctgatacagatgataaagtagatatcttcctgtcagagacagactatgtatacaaatatacagatgctgaagcagacgctgcaatgccactgaaggatcttggaattgatccggataaagatcttgcagatcagtacgacttcacaagaacaacagcatctgatgcagacggagttcagagaggatctacatggcagtgctgtccgggaacaatggtttaccgtcgtgatattgcaaaagaggtattcggaacagacgatccgactgctgtaggtgaaaaagtaaaagactgggctactatgaaacagacagcagaagaactgaagcagaaaggatattatgcatttgcttcttatgctgatacattccgtctctatggaaacaacatttctgattcatgggtaaaagatggagacacaaaggttacagttgatccaatgatcatgcagtggattaatgattcaaaagaatggctggatgcaggttacttaaacccgacagtaaaaggtcagtggaatgatgactggaacaaagcaatgggaagtcagtccaaagtatttgcattcctcttcccggcatggggtattgatttcacactgaaaccgaactgggatggagaagacggcgtatgggcagtaacaaacccaccgcaggaatacaactggggaggatcttacatccatgttgcaacaggtacagataatccggaacatgcaaaagacattatccttgctatgacagcaaaaaaagataatctgttaaaggtctcccaggattactcagactttacaaatacaaaatccggtatgcaggaagcagcaaacgatgatgctacatatggttcagaattccttggcggacagaacccattccagtattttgcgccagttgctgaaagcatcaagatcgcaccactttccgcttatgatcagggatgtgtggagttgatccagaactcattcagcgattacttccagggcaaagtcgactttgagaaagcaaaatcaaactttgaaacagcaattaaagaacgttatcctgacattacagaggttgtttggccagaataatgtctggaatgaacagctactaacgcagggagctctgtgacagcagagcctctgttctgttagaagatattgtggaaaggaagaaccattatgaagaaaaagaaaaaaagtattgattatggaaaatggggatatatatttattcttccttttttcgtaacatacattattttctcattgataccgttgatcgatacagtaaggtatagtttctttgaatattaccgatcaggaattaaagaggttggaccgaattttataggaatggcaaactatgtgagtcttcttcattcagatatgctgaaatatggagcgaatactttaattctgtgggtgatcggatttatacctcagattgtgatcgcgctggtacttgcagcgtggttcactgatgtccgattaaagattagagggcagcagtttttcaaagttgtcatttatcttccaaacctgattatggcatctgcatttgcattgttattctttacaatgttctcaacaaatggaccgattaactcaattctgatgtcaatcggaatcctgaaaaaaccgatcgatttccttggatctgtatttggaacaagatcgttgatcggatttatgaacttcctgatgtggtttggaaatacaactattatgttgatggcagcaatcatgggaatcagtcaggacgtcttcgaggcatctgacctggatggatgtaacagtatccagagattcttctatattacactgcctataatccgtccaattctggcatatacattgatcacatccattattggcggacttcagatgtttgatgttcctcagatcctgacaaatggacagggtaacccgaacagaacatccatgactctgatcatgttcctgaacagtcatctgaagagcaaaaactatggaatggccggtgcactttctgtatatctgtttgtcgtaagtgcaatcctctgtttctttgtatatcgtatgacaaatgataacgatccggatggttctaagaaagcagctaagaaaagagcaaaagcagaaaggagaaagagataatgaaatcaaaaacaaagtcaagtcgtggacgtagcatactggcacataccgtattgattctgttatcttttatgtgtctgtttttcttctatgtgttgattataaatgcaacacgttctcattcagatctgcagaagggattctcagcactgccgggaaaatatttctttacaaatctaaaaaatgtagcgaatgacggaagcttcccgatgttccgtggtattttgaacagtttgatcgtatcagggtgttcagcagcattatgtacctatttttcagctctgacagcatatgggctttatgcttatgattttaaagcgaaaaaagtagcattcacatttattatggcaatccttgttatgcctacacaggttacagcaatgggattcctgaaattggttacgaacatgggaatgtatgattctctgcttccattgatccttccatccattgcatcaccggctgtattttatttcatgtacagttatctgcagtcttcccttccgatttctcttgtagaagcggcaagaatagacggatccggagaatttaggacatttaaccacattgttcttccaatcatgaagccggcaattgcagttcaggcaatctttactttcgttggttcctggaacaattacttcgttccggctttgatcattcagtcaaagaataagatgacagtcccgatcctgatcgcaacacttcgtggagcagactatatgaactttgatatgggtaaaatctatatgatgatcacagtagcaatcgtgccgatcattattatatacctgctgttgtctaaatatattattgcaggagttactcttggtggagtaaaagaataataagaaataagttgttggaggaaggctgtcatttagtgggcagcttttttcttacagttggtttatttaaggagatgtgtaaatggaaacaaatttgaaacatagtggaacaagaagtacagaagtttgccagcgtgaaatagatcatgcagtgtttgcgcgtgaggcagcagaagaaggaattgtcctgttgaaaaatgaaggacttcttccattaaaaaaagatacaaagattgcacttttgggaattggggcagagaagacgatcaaaggtggtactggttccggagatgtaaataacagagaaagtgtatctatatatgccggaatgaaagaaaaaaacgctgatattgtaagcgaggagtggctgaaagattatcacaaccgttatgagcaggcgagaacagagtggaaggagcagatcttagaagctgcaaaacatgtagacaatccatttgatgcctatgctgccaatccatttgccatgccggatggccgtgcggtgacaaatgaagatatcaaggctgcagaagcagcggtttatgttataagccgtatttccggcgaaggaaaggacagaagaaaaagaaaaggggattattatctgagtgaccaggaagaaaaagatctgtatttcctgaacgagcagaaaatcccaactgtattgatcattaatgcaggtggaccggtagaacttacagacctgctggctggaacagaaaatatatgtgcaatcctgaatatttcccagcttggacaggaaggtggaaatgcagttgctgatatattgtttggagaatttacaccgagtggaaagctgacaacaacatggacaaaacgctacgatgattgtccggcagcagaggagttcagctatttgaacggaaatcttgagacggaagaatatgcggaaggaatctatgttggataccgctattttgacagctttggaattgaaccattattttcatttggttatggtctgtcttatacagaatttgacattcgactttgcggtataaatactgcttcgaaaggtgtgacagtaactgttgaggtagaaaacacaggaacaacatacagcggaaaagaagttgtgcagatttatgcttctcttcctcaggatggaagcagaaaagaattccgtcgtctggtcggatatgaaaagacagaagaactgaaaccgggagagaaagagatgctgaatattgttcttcctgcaaaggcgttcgcaagctttttggaagagcagcaggagtggagaatccaggcaggtgcttatggaatatggattggaaacagcttgtcagaggcaaaactttcagcgggggtaaaggtatctactgatgtaatgatggagaaaacaaagaaactggaagatcatagtgaagtcgttgaaatcaaagactgtgcagaagaattatgcagacgcgcagaagaatggacagcactgcttgaggaacttccgaacgtatcatttgaaccagaggcagaagaaaagaaagtatgcagatttccagaagaaacggagattcctgtagaagatttgatcccacttctgtatggaaatatgtctgaaatcagaagtacacttggagcatctggaattaaagtgccgggaacagcaggagagacgagtgaagcactgcttgatcaatacggaatcccatctttgatcatggcagacggaccggccggaatccgcctgcagcaaacttatgaagtagaccgtgagaaagatacagtttatggaacaggtgtgcttggttcacttgaaaatggttatcttgttggaagaaaagaccatgagggcgcagaacgttactatcagtattgtactgcatttccggtaggaacagcacttgcacagtcctggaacaaaaaactgatggaacagtttggacggaaggttgcggcagagatggaagaatttcatattaatctctggcttgcaccgggattgaatattcacagaaatccgctgtgtggaagaaactttgaatattattcagaagatccattccttgcaggcacactggcagcagcagtgaccagaggagttcagagcagaccgggatgtggtgttacaatcaagcattttgcatgcaataatcaggaagataacagaatgggggttgatgcacacatatcagaaagaacattgagagaaatttatctcagaggttttgaaattgcagtgaaagagggcgcaccaactgcaatcatgtcttcctataatctgatcaatggtgtgcatgcagcaaacagcaaggacctttgtacaaggattgcacgtgaagagtgggggtttgacggagttataatgtctgactggaatacgacagtaccggaggatggaagcattccgtgggtttgtgtggcagcaggcaatgatattattatgccggggaatccggatgatgataaaaacattcgtgatgcgtataaagaaggaaaacttacagaaaaggaaatccgtctttgtgcagacagaattctgaaactgattcgaagattaagctgattatgtcaatttagttgttacatatccgtatgtgggactaccggatacgaaatactttgggaaacattcatgttgtggattttaagacatctcacgtaaggacgttcttttctacattgtcagatgaaggactggcacacagtacgatcaaaggtctttatggcttattgaatcccagttttgaactggcagtagaagatgggattatccgtaagaatccggtaactggaacactaggagattagggggctccggcaaaggagaaagaagcactgacactggaacagcaggaaaaacttctgaagtttgtggaacagagtaatgtgtataagcctcatcttccaatgatgcaggttatgtttggggcttgcctgagagtgagtgagaccatcggcttaacctgatcagatgtggatatgaagaatctggagatccatgtaggtggacagcttgtgtattatgaaggtgatgaaggatattgtttccatgattagaaactaaaacggatgcaggaatcagagacattcctatgacacagatggtatatgctgcgttccgtaaatagagagagctgaacctgatgcctcctagttcatcgcatacccttcgtcatacgggatgtaccagactgggtgagaacaatgtcaatcccaaagttatgcagtatgtgatagggtgctggatgtccgatggagatccgtttagcaccgaccgtagcggagcgaagaacattcagatgcacagatcacaatgaatgtctacaatcatattgcagagaagcctcatgtggagaatgagatgtctaaaatgaacctgccagaaactgtacctgctgtggtataaaccagaagccgttgtcgtaaaatgtggtaagaaaatcagacgaatatatttttccaagaatttgtggtaaaaatgtggtcaaatcaagaaaatcgagtgcgaaagtaagtgaaaaatccctgtgaagcccgtaaaatcaaggcttcacaaattcttcacaaaataattagcactcatctattgacatggctaacaacatatgttatatctattatagaacaaaaagaaagagaggtaacaagatgaacattaataaatttacccagaattcattgcaggcggtacaaggatgtgaaaaagttgcctatgaatatggcaatcaggaggtagagcaggaacatctgctgtatgctcttatcatacaaaatgacagtttaatcgcaaatctaatcgagaaaatggggattcagaagcagttgtttagcaatcgcgtggaagaaggattaagaaaacgcacaaaggtacagggcggacaaatctacattggccaggatttgaacaaagctttgattcatgcagaagatgaggcaaaacagatgggagatgagtatgtttcggtagagcatattttcttatctctgttgaagtatccaaacaaggaattaaaggccattttcagagaatttggaattacgagagaaggatttcttcaagcactttctactgtccgaggaaatcagagggtgacaagcgacaatccggaggctacgtatgatactttgaataaatatggaagcgatctggtagaacgagccagagaacagaagctagatccggtgatcgggcgtgacgcagagattcggaatgtggtccggatcctttcaagaaagacaaagaataatccggtattgatcggagaacctggtgtcggtaagactgcagcggtagaaggccttgcacagagaatcgtcagaggagatgtgccggaaggtctgaaaaataaaaagatttttgcgctggatatgggggcacttgtagctggagccaaatatcgcggggagtttgaggaacgtctgaaagcggtactggaagaagtgaagaacagtgctgggaatattattcttttcattgatgaacttcatacaattgtcggtgcaggaaagacggatggtgcgatggatgccggcaatatgttaaaaccgatgctggcgagaggtgaattacactgtattggtgcgacaacgttggatgaatacaggcagtatatcgagaaagacgcggctttagagagaagatttcagccggttatggtagatgaaccgacggtggaagatgccatttctattcttcgtggattgaaagaacgctatgaagtatttcatggtgtgaagatcacagatagcgcacttgtggcagctgcaacactctccaacagatatattacagaccgttttctgccagataaggctatcgaccttgtagatgaggcatgtgctttaattaagacagagttagattctatgccgacagagatggatgaactgcgaagaaggatcatgcagttagagattgaggaggctgcattgaaaaaggaaaatgacagactcagtcaagagcgtcttgttcatttgcaacaggaactggcagagatgcgggatgaatttgccggaaagaaagcgcagtgggacaatgagaaaacatctgtggaacgtttgcagaagatccgtgaggagatagagcaagtcaatcaggagatacagaaagcacagcgttcttacgatttggaaaaggcggcagaacttcagtacggaagattaccgcagctgacaaagcagcttcaggaggaagaagaacgtgtcaaaggaaaatcgatgacacttgtgcatgaaagtgtcacagaggatgagatcgcaaggatcatctcacgctggacgggcatcccggtggcgaagttaaatgaaagtgagagaagtaagacccttcatctggacgaagaacttcataaaagagtgatcggacaggacgaaggtgtgacgaaagtgacggaagcaattatccgttccaaagcaggaatcaaagatcctacaaagccgattggttctttcttattccttggaccgaccggtgttggtaagacagaacttgcaaaggcacttgcgcaaagtctgtttgacgatgagagcaatatggttcggatcgatatgagtgaatatatggaaaaatattccgtgtcacgtctgatcggagcacctccgggatatgtcggatatgatgaaggaggacagttgacagaggcggtgagaagaaaaccatattctgttgtactgttcgatgagattgagaaagcacatccagatgtattcaatgtgttgcttcaagtattggatgatggtcggattacagactcacagggacgtaccgttgatttcaaaaatacgattttgatcatgacatcgaatatcggttctacgtatttgttagatggaattgatgagaatggggaaatcaaagaagagagtgagactctcgttatgaatgatctgcgggcacacttccggccggagtttttaaatcgtctggatgaaatcattatgtttaagccactgacgaagaaagatatttacgagattgttgagttgttgattcaggatttaaataaaagattgcaggattctcaagtgaagatagaactgacagaagctgcaaagcaatttgttgtggatggcggatatgagccgatgtacggtgcaagaccacttaagagatttttacagaaaaatgtagagacactggcagcaaagttgattctttccggagaaatcggagcggaggatacaatcttgatcgatgtagaagatggagcactcaaggcgagagtcaaggcgtgggtaagatcctaacaaagtgaattcaatcagcggaagcgatttgtggaagcagtctgcatgtgaagccgtttttcgttgacgaaagaggacatttgtgcaatgatagaaacagtacagatgttctctttttgttgcgaggaatattttttgaaatcccagatgataaagagatcagagatggaaaaagtgtacttttaataggctagggaaaggagcagacatgtcatccattatttttcatattgatgtaaattccgcttacttaagctggactgcggtggaaaaattgaaaaacgggtcagagattgatctgcgaaagattccttctattataggaggaaatcaagcatccagacatggggttgttctggcaaaatcaatccctgcaaaaaagtatggagtgagaaccggggaaccagtagcaaacgcgctcagaaagtgtgcgacactggtaattgaaccgccggatcataagatgtacagacagtatagtcagagactgatggaattcttgaagggctatacaccagagattgagcaggtcagtgttgatgaatgctatatggattttacagggattgcttatcgattttccggtccggttgcggcggcagaggaaatcaaagagcgggtacgaaagacctttggatttacagtgaatattggaatctcctcgaataaacttcttgcgaagatggcatcggatttcgagaagcctgataaggtgcatacgttgtttccagatgaggtgaaagaaaaaatgtggccacttccggtttcagaactttatatggcgggaagagcaagcgttgaggtgttggaaaagcttgagatccgcacgattggggatcttgccagaatgaatccacaacttttggagctgcacatgaaaagtcatgggaggatgctgtgggaatttgcaaatgggattacgcattccaaggtggaaaaggagcagacacaggcaaagggaatcggcaattcaacgacactgtctcaggatgtggtaagtgaggaagaggctcagaaagtacttctgatgttggcggaaagtgtcggtgcaagacttagaaaagcaaagcagcaggcggggatggtcaatgtggaaatcaaatatgctacatttcaaagtgtttctcatcagaagcagcttaggatgccgaccagttcagatagtattctgtatgagaatgcctgcagtcttttccgagaattgtgggatggaagaccgattcggctgttaggagtccgtacatcaaagctggtagatgagagtgcgccgcggcagatgaatctgtttgattatcagatggagcaggagattcagagaaaaaagaaggatgcccgcaatacaaaatatgaaaagcttgaaaaggcggtagatgagattcggaaaaaatatggggagcatgcagtgatgagaggagtgctgctcccgccagaaaaagaatagtagaaaaaggaaaacaaaagatcaatacttttctgtaaatttttttacttcattgccaagctgctcttcaaaatggtctccaaaccattcgttttccaaagagatgtttcttgaggaagaagagtttgctcttcgttgcctggaggagcgcatggcttctcgataatcttcctcttcgtaatcgtcctcataataaccattgtcatcgaatgtatcatcgtattcatcatcgagcacatcatcatagcgacggcgctttctggaagaggaatattcccgaggttctggagagttgtatcggtaatgatttgccggagcagaacggcattcgtaggagccgtaagatcttcggggagtgcggctgtgtctggcattttttcgttccaggcggtgccgtctccgttccaacatgcgtgcaggtgcaagaaagataaagcagacgatccgcacagttaaaattccgaagaatacaccgatactgtcgatgcctacatcaatcacagaaggtcctcgcccatctacgaaggattgatgatattcatcccctgcggcaaatccgacacagatcagtccggcgacgaccataagcggaaaaccgcgcaaaccgtagacgtaaaacgggaaggacactgcgacagcaaggatgaaatattcgctcatatgtgcaagtttgcggaccggatattcgatgctggcagcaacttcagaaatttcccagtcctgaagtcctttatccagaacctgatttccgatttctacaatttttacacttacttcataacttaaatttcccgattcctccccggtctgaccggaaaaagaatagattatatacataattgccagtgccggcagaaaagacagtggttttaatacaaaggtgatcagttctttcataatgcttatccctcctttttattattacgccactatatcattttttcagatatttgtaaaggaggacaaaattccacattgggaatcttcttaaaataaaggaaatagaggaagactgttttacaactatatccgagtgtgttattctataactgttatccatatcgcaaagcggtatgtagaaagtcaggagggaaaccgcatgaaattaacagcattgttagaacgtttacaatatgaagttgtgcagggaacaaaagagatagaaattacggaattgacaaatgattccagaaaagtaacagaaggcagtgtctttgtctgcatcagtggagctgtatcagacggacatcagtatattgaagaagtaggaaagaaaggtgcggcagcagtcattgtggagaaggatgtggaggcaccaaagcatatgaccgtcatccgtgtggaagatacgagatatgcactggcacttgcatcggctgcatatttcggatatccggcagaacagttgaaagtaatcggaattacaggaacaaaggggaagacaacaacaacttatatggtcaaatccattctggaagaggtcggacataaagtaggtctgatcggaacgattgaggcaatcattggggatgaggtgatcccggcggtcaatacgactccggagtcttttacaattcaccaatattttcggaagatggtcgatgcagggtgtgatgcagttgtgatggaagtgtcctcacaagggctgatgctgcatcggacggcaggaattccatttgaaatcggaatttttacaaacctgggggaagatcatattggaccgaatgaacataaggattttgaagactataagagatgtaagggattgcttttcagacagtgtaagatcgggattgcaaatgtagatgatccctattttaaagatgtattccgagaggctacctgtgagatagaaacatttggattttccgagaaggcagatcttcgcgccgaacatgcagaactggtgacaagaccggggtacctcggggtagcctatcacgtagcaggtctgatggattttgatgtggagattgatattccagggacgttcagcgtgtataattcgctgacagccattgcagtgtgcagacactttaatgtaccgtcagagaagattcaaaaagcgctgaaagtagcgaaagtgaaagggcgcattgagatggtcaaagtttcagatgaatttacgttgatgatcgactatgcgcacaatgcgatgagtcttgagagccttctgaccaccttgaaggaatatcatccaaagcgtctggtatgtctgtttggatgtggaggaaaccgctccaagacgcgccgctatgagatgggagaagtgtctggtcgtctggcagatctgacgatcattacatcagataatccaaggtttgaggagccgcaggaaattattgatgatattaagattggaatgaagaagacagatggagcatatgtggagatctgtgaccggaaggaggcaatccgctatgcgatcgtcaacggacagccgggagatgtgatcgtactggcaggaaagggacatgaagattaccaggagatcaaaggagtcaagtatgcgatggatgagcgggacttgattgcggatattctggcagaagaaagagaacgggagcagtaaatgtacgcagatatcattgtagatattacccatgaaaaattagataagatctttcaataccggattccaaaagagatggaaggacggctgcagactgggatggaagttttgatcccgttcggcagagcaaatcgtgagacaaagggatatgtgattggattctctgaaaaatgtaattacgatccggagaagattaaagagatcacacagatcagccagaatcatattgcgattgaggcaaagctggtggcgcttgcggcatggatgaaggaacattatggtggaacaatgatacaggcgttaaagacggttcttccgatcaagcagcaggagaaacaaaaagagcagagaagcattcgattgcttcttgacagaagagaagcaaaagaaaggctttcgtattttctctcaaaaaatcaaactgccagagcaagggttgttgcagcgctgttagatcgtcctattcttccgtatgagtatgtcacaagacagctgaaagttacagcggcggtgctccgggcgatggaagagcagggaattcttcagatagaagccgaggttgtgtaccgcaatccggtgactgcgaagcgaacaaagcaacagtcattttgctataccgaggcacagcaggcggcaatccatatattttgtgaagagtatcgtcggggaaaacggggaacttatctcgtgtatggtgtgactgggagtgggaagacagaagtctacatggaaatgatcgagcatgtgatcgcggaaggaaagcaggcgatcgttctaatcccggagattgccttgacctatcagacggtcatgcggttttaccagagatttggcgaccgggtgtcaatcatcaattccaggctgtcaaaaggggagcggtatgatcagatgctccgggcgaagaggggagagatcaatgtgatgatcggtccccgctcggcgctgtttactccatttgagagactgggactgatcatcatcgatgaggaacatgaaggaacgtataagagtgaacagacaccacgttatcatgcgagagagactgcgatcgcgcgtgccgcgatggagggggcaagtgttgtgcttggctccgcaacgccgtcgatggaggcgttttataaagcggtgactggggaatttcgtttgctcagacttccggaacgggcaaagcaaagagcgatggcgcatgtgacagtggcagatatgcgaaaagagctggaaaaggggaatcggtctattttcagtgatgcacttcgcagtctgatggaagaccggttaaagaaaaaggaacagattatgctgtttttgaaccgccgtgggtacgcgggatttatctcttgccgttcctgcggtcatgtcgtgaaatgtccgcactgtgatgtgtcgctttcttctcacaggaatgggaaacttgtatgtcattactgtgggtatgaacagccgatggtgacatcctgcccggaatgtggatccagccatgtcggaggattctgtgcgggaacccagcagatcgaagaactgcttctgcgggagtttccgcaggcgaaagtccttcgaatggatatggatacgacgaaacagaaagacggacatgagaagatccttgctgcattttcaagcggggaggcagatattcttgtgggaacacagatgatcgtaaaaggacatgactttggaaatgtgacactggtcggagttcttgcggcggacttgtcgctctatgcggacgattaccgagccggagagagaacctttcagcttctgacgcaggcggcaggccgagcggggagaggagagaaggccggagaagttgtgatccagacatacagtccggaacactatagtattgtagcagcggcaaagcaggattatgaacagttttttcaggaagaaatgacttatcgcgcattgatgggataccctccggcaagtcagcttatggcagttctcgtttcctgtaaggaggaagaacttcttgagacagcatgtcactatctgaaggcttatgcggaaacatgctgcaaaaagtgtgagcgggcagggacctctgtgcagctgatcggaccggcaagtccgtatgtcgggaaggtcagggatacttatcgcagagtgatttatctgaaatcggagcaggaagcagtacttgtgttcctgaaggatcagctggaacaatatatagagatcaacagtggatttcaaaatctttggatacagtttgatctgaatccgatgagtgtgttttagtgagctcaattacagcatgataaaatatataagaataaaaatggaaagaaaggagagtatggcgtagttttataggaaatacaccatacgagaaagaaaatggcaattagaaagattcgtgaaatgggagatgacgtgctgacaaaagtctgcaaggaagtagaaaaagtaacccctcgtacaaaagtgctgatcgatgatatgtttgatacaatgtatgatgcgatgggagttggacttgccgcaccacaggttggagtgttaaagagaatcgttacgatcgatgtgggagaaggaccgattctcctgatcaatccggagatcattgagacttccggagagcagaccggggaagaaggatgcttaagtgtgccaggaaaatccggtgtggtgacaaggccgaattatgtcaaagtgcgtgcatttgacgaagatatgaaagaaattgtacttgagggagaaggacttcttgcccgtgcattctgtcatgagatcgatcatctggatgggcatttgtatgtagaaaaagtagaaggcgaactggaagatatgtattacgaagaagactaggaggaaatgtgatgagagtcatttttatgggaacaccggaattctcggtggggacattggagacacttgtagaggcaggtcatgaagtcgtgcttgcggtcacgcagccagataagccaaaaggacgaggaaaagagatgcagtttactccggtaaaagaggcggctatccgccatcagattccagtgtatcagccggtgaaagtccgtgagaaagcgtgtgtggaagtgttgaaatcgtacgaggcagatgtcattgttgtcattgcattcggacagatccttccaaagagcatcctggagttgacaccttatgggtgtattaacgtacatgcatcactgcttccaaaatatcgtggggcagcgccaatccagtgggcagtcattgacggagagaaggtgtcaggtgtgacaacgatgcagatggatgagggacttgatactggtgatatgatcttgaaaaaagaagtcattttggatgaaaaagagacaggtggaagcctgcatgacaagcttgcagaagcgggtgcggcgctgtgtgtagaaacactgaaaaggctggaagaaggaacagctccggctgaaaagcaaggggaaacgacgacagattacgcaaagatgctgacaaaacagatgggagagattgactggaagcagccggcagagaagattgagcgtctgattcgagggttgaatccgtggccaagcgcctatacatactggaaccagaaagttatgaaaatctggcttgcagatactgaggcggatgaaagcggcgaaaaagagaaaatggcgtcagaggaagcaaaacatccagaacctggtaccatcacagcagtcgcaaaagacaggttttctgtgcagacaggagaaggacttctgactgttttggaattacagattccggggaaaaagagaatggatgcaggagcatttttaagaggatatcagatcaaagcgggagaaatcttaggataggaagattttggagagaggaacttgagaaatcgataaagattctcttaaaaaactataaaataaagtatttctaagggaaattcgtatataatgattctgacagctgtaaaaagcagcagtttacacgaagaagtctttatcagataggagcgagaaaatgtatagagcatattatccaatgtattttgatccaacatacctgcttgtgattgtaggagtattgctctgcatgcttgcatctgcaagggtgcggacaacttacgccaaatatgagcgggtgagaaatcattccgggatgaccgggagagatgcggcagaaaggattttaaggggagcaggaatttttgatgtacgaattgaacgggtaagcgggcatctgacggatcactatgatccgaggaataaagtgttacggctgtcggacagtacgtatagttcagcatcggttgctgcagttggtgtggcagcgcacgagtgcggacatgccatccagcacgcggtcggatatgcacctcttaacatccgaagtgcacttgttccagtggcaaactttggatcgactatcgcatggccgttgatcgttcttggactttttatttccggaaattcttctagtcttctgatccagatcggaattttggcattttcattatccgtattgtttcagattgttacactgccggtggagtttaatgcatctggcagggcaattcggattttaggagagagcggaatgctctatccggatgagatcagcggtacaaagagagtacttggtgcagcagctttgacgtatgtcgcgagtgctgcgtcagcaatcttacagctgatccgtatcatattgatcacaggaggaagaggaaatggcgaaaatgacagatgatagggaattgatactcggtgtttttcttgaaattacaagggatggagtgtacagccatatcgccattcgaaatgtgctggagaaataccagtatttagataaaaaagagcgtgcctttatcacgagagttgtggaaggaacgctggagagaatgattgagatcgattatattatcaatcagttctcaaatgtgaaagtaaataaaatgaagccggtcatccggacgattcttaggagcgcagtctatcaattaaaatatatggacggcgttcctgattctgctgtctgcaatgaggcagtcaagctggcggagaaaaaagggtttcgtagtctaaagggatttgtcaatggggtgttgcgcacaattgcaagaaatatggatcagatccgttatccggagaaagaaaaaaatcctgtatcatggctttccattcattattctataccggaatggatggtaaaactgtggctttccgagtatggtgcggagactgttgagaagatgctgaaaggatttctggaggaacatccgacagtgatccgctgcaatcttcggaaacactccgaaaaggagctgacagagagactccggaaagaaggtgtgaaggtggaagcacatccatatctttcctatgcaaagaaaattagcggatatgatcatcttggcgggctggagagtttccgggacggagcatttcaggtacaggatatcagttctatgcttgttgcagagattgcagctccacagagaggcgatcaggtgatagatgtctgtgcggctccgggagggaagtctatgcacattgcagatttgcttgatggcagtgggatggtagcagcgagagatcttacagaatataaagtaggactcatcgaggaaaacatctgccggactggattccaaaatataagggcagagcagaaggacgctaccgtttttgataaagattctgagcggatagcggatattgtaatcgcagatcttccatgttctggattaggggttctggcaaaaaagacagatctgaaatataagatgacaaaggaagggacagaaagtcttgcaaagctccagagggagattcttggagtagtgaaaaattatgtgaaggagggcggagcgctcgtatatagtacatgtacgatcaatccggcagagaatctggaaaatgtgagatggtttcttgacaatagtccagaatttaaagcagaggatattacaccatttctctgtggagaacttcaaaaggatgtcaaagaaggatgtcttcagcttcttccaggagtccatgacagtgacggattttttattgcaaagttcagaaggaagagaaagtaagaggtagttatgaaacaggagaaaaaggatatcggatctttccggtttgaagagttgaaggaagagatgacatcgattggagagaaagcatttcgcgcaaaacaggtttatgaatggctgcatgtaaagcttgtgcggtctttcgatgagatgacaaacctatccaaaccactcagagaaaagcttgcacgccagtatgagatccgggaggtggagatgcttgacagacaggtgtctgcaatggatgggacaaataagtttttgttccgattaagtgatggacatgtggtagagagcgtgctcatgaaatataagcatggcaattctgtttgtatctcctcccaggttggctgcaggatgggatgtcggttttgtgcctcgacgatcggaggacttgagcgaaatctcacgccgtcagaaatgcttggacagatctatcagattcagagaatttccggtgagcgtgttgcaaatgttgtagtgatgggaactggggaaccgttggataattatgaaaatttattaaagtttattcagatgctgactgatgagcacggacttcatattagtcagagaaatgtgacggtttctacttgtggaattgtgccaaagatgctggagctggcagaagagcatttgcagattacattggcattatcccttcatggatccacgcaggaaaaaagaaagaaactgatgcctgtggcgaataagtatgaactttctgaagtgctggaagcgtgtgatatatattttgcgaagacaggaagaagaatgactttcgagtatagtcttgttcatggagtgaatgataccgaggaagatgcaaaagaattaagtgcacttctttctcatagaaactgccatatcaatctgattccggtcaacccgatcaaagaacgtgattttgagcgaccgacaagggaggcggctgagaaatttaaaaataaacttgaaaaaagcggaataaatgttactataagaagagaaatgggttctgacattgatggagcctgtggacaactaagaaagcgttatgttgaaacaaatggaagtaaaggagaacatcatgaaaacattttctaagacagacgtggggagaaaaagggagacgaaccaggattatgtctatgccagaacgaaaccggtaggaaaacttccaaatttatttgcagtggctgatggtatggggggacataatgccggagatcgtgcatccaagtgtaccgttgagatattggaacgtgaaatagaggagagcacggagacaaacatcaaggacattatccgacaggcaatatataaagcaaacgagaagatcattgagatggcagaaagggacagcaagttagaaggaatggggacgacgcttgttgttgccacgattgtacataacatgatttatttcgcaaatgtgggggacagtcgactttatctgatcaatcatacaatcacacagttgactaaagatcactcccttgtagaagagatggtgcgccttgggggaatcaagccggaggaggcaaggaatcatccggataagaatattattacgcgtgcaatcggagcaaaagagggagtggaaccagattttttcgaacacagtctgaaaaaaggggacatcattttgatgtgctcagatggactcagcaatatgatagaagatgaagaaatatttcagattgtaaagagtggaagggatgttgtggagattacagaggatctgatcgaaacagcaaatgaaaatggcggaaaagataatataggggttgttgtgattgagccattggcagatgaggtgagtatatgttaaatgaaggaaccatgttaaatggcaggtatgagatcctcggcaagatcggcgccgggggaatggcagatgtttataaaggaaaagaccataaattgaatcgctttattgcgataaaagtgttaaagaaagaatttcatgaggatgattcatttattcagaaatttacaagtgaagcgcaggcggcaggcggtcttatgcatccaaatgtagtaaatgtgtacgatgttggggaagatcaaggtgccaattatatggtcatggaacttgtggaaggaattacactgaaacagtacatccagaaaaagggacgactttccgcaaaagaggcaatcagcattacaattcagatggcaaatggaattcaggcggcgcataataagaatattatccacagagatattaagccgcagaatgtgatcatttccaaagaaggcaaagtgaaagtgactgactttggtattgcaaaagcagcgaactcaaacactatgagttctaccgtacttggatcggtgcactatacatcgccggaacaggcaagaggagctgcaagcgatgcaagaagtgacatttattcacttggtattacaatgtatgagatggtgacgggtcgacttccatttgacggggatactgcagttgcagttgcggtaaagcatcttcaggaagagatcgtatctccggcggagtatgtaccagagctgccgtatagtttggagcagattatcttgaaatgtacacagaaacggcccgaattccgttatccagatgtggcatcactggtacttgatttaaaacgttcgctcgtggatccggaaggagactttgtgcggatcagaagagtaccgggttccgatacggtcatgttatcagaaggagaacttcagcaacttcagatgaataatatatctgcaagacgatatgacgattatgacgatgatgattatgatgaagagcagtatgatgattatgacaatgactatgatgatgactatgacgatgactacgatgatgagtatgatcaggacgatgattatgacgaggatgactatggaagaggaacatctcggaaaagaaatggagatgtcaatccgcggatgaacaagctgatcaagattctgatgattgtcgttgcagttctgattgcatttttcgtgatcatgatggcaggaaaggcggcaggaatctttggagccggtctgggatttgtcacagaagattcaaaagataaagtaaaagtgccgaatgttgtcggtaagacacaggcagatgcgattgaggctctgaacaaagtaaatcttggatatgaacttgtggatggcggagagtctgataaatatgaaaaaggctatgtcatggaacagggaacaaaagcaggtacaaaaatagcgaaaaatacaagagtcaagattgttgtaagcagtgggaagaaaaaagaagaagtgaccatgccggatgtgaagggactgaaccaggataaagcacagaaagaactggaaaagctgggactgaaagtttctgtcacctatgagtatagttcgatgtataccgagggagaggttatttccacaacttacgagccgggaaccaaggtggcaaaaggtacagaagtaggcatgcaggtaagtaaaggcgaagagccaattgagaaagtggccgtaccggaaattacaggaaagacagaagttgatgcgattgcagctttagaagcagttggattatatgccggggacaggaaggaagagtacagcgatgaaccggcagggactgtgatctcccaggatattgcaggtggaaataagattgaagtcggaggaagtgtcggttatacagtcagcaaaggaaaagaaaaagcaaaaatgccggcagtgatcggtctttcagaggcggatgcaaaggcacaacttcaggcagccggattgacaccggtcatctatcatgagccaaatgaaaatcaaaaaggatctgtattttatgccagtgcgaataccggggatgaactggaaaaaggagcaacggttgaaatctggatcagtgacggtccggcagaacagccgcctaccgatggaaataacaatggaaacacagatcataatggcagcggagataacaatagcggcagcacggatggaaataccactggtcaggaaggaaattccgggcattagtttgaaggaacaaaagcggtacagtactgtgtatttgtgcccggaagccagataaataaatggataagggaaaattcatgcagggaaagattgtaaaaggaattgccggattctactacgttcatgtagtaggattcggtatttatgaatgtaaggcaaaaggaagtttcagaaaagagaagagaaaaccactcgtcggagataatgtagagatcgactgcctgagtgaggaagagaagacgggaaatattattcagatttttccaaggaaaaacgaattgatccgtccggcagtagcaaatatcgatcaagcacttgttgtctttgcagtgacggatccaaagccacacttcaatctgttagacagatttttgatcatgatggagacaaaagggattccggcggtgttatgtttcaataagcaggatattgcaacagaaaaagagattcaggaattgcaggaaatttacagaaggtgtggctatcagatcctttttacgagtgcaaaaaaagaggaaaatattgcgcttgtaaaagaggttttaaaaggaaagacaacaacggtagcaggaccttccggagtgggcaagtcttccttgatcaatattcttcagccggaggcgaagatggagacaggggaaatcagcaagaagattgctcgcggaaagcatacgacaagacattcggaactgattccgattgatgaggattcctatattatggatactccgggatttagttcgctgtatgtgaatgaatttgaaaaagaagaattgaaatattattttccggaatttacatattatgaaggaatgtgcaaattccagggatgcgaccatattcatgagccgaagtgtgcggtcaaggcagcggtggaagctggagagatccacaaagtgcggtatcagaattatttagagatgtataaggaattacaggagaagaggagatactaacatggaaatgattttggctccgtctatattggcggcagattttacaaaattaggggaacagatgaaagagacagagcgggaaggagcacagtacattcattttgatgtgatggacggaaagtttgtgccaagtatttcttttggaatgccggtactggcatccatcagaaacgcagtggatcagatttttgatgtgcatttgatgattgaagagccaattcgttatgtagaagaatttcagaaagcgggggcagatattatcaccgttcacctggaggcgtgcagtgatgtgaaagcgacactggagaaaatcaaagcatgtggggcaaaagcggcaatctcaatctgcccggatacaccggtagcagaactggagccatatgtggaattggtagatatggtattgatcatgagtgtacatcctggatttggaggtcagtctttcatcccatcttctctggagaagattcgagagacgagagcactgcttgaccgtgtcaactcaaccgcagatattgaagtggatggtggaatctatacaacgaatgtaagagaagtactggaagcaggggcaaatgtgattgtggcaggttctgctattttccgtggagatgctgcagaaaatacaaaaaatatgatggagatcttaagagcttatgaatagacaacatgttgtgatcatcagcggcggcacagtggaagaaaagcttgcactggacattttaaaaaaacaatcgtctgcatttctgatcgcggttgaccggggactggaatttttttataagcacaaaatcaagccggattatattgtaggagattttgacagtattgcacctgagattatcgcctggtacaaggagtggacagagattccaatccgggagtttaatccggtcaaggatgcgtcagatacagagattgccgtgcgatatgcagtggagcgtggatacggaaatatcacgattctcggaggaaccggaacgaggctggatcatgtgatggcgaacattcaggttctttcaattcctgcacgggcaggaattccggcagaaatcattgacggacacaatcggatccgggtcgtggaacgagaagtacggttgaaaaaatcagagacctatggggaatatttctctttatttccactcggaggagaagtccgacatctttatattcgtggagcaaaatacccattgacagatcacattcttgttccttacgacagcctttgtgtgagtaatcagattgacggggaggaagcggtcattgcttttggtgaagggatggtcattttaatggaaacaagagaagaaatgtatcaataagtgaaaaaagtaaaaagtcacaaaaagaagaaaaaaagaaaaaggaacgcagggtgtctattggcaaacctgcacagatatgatagactaagatgtaagaatgcatgttcacagaactgcatctgacagcagaaaagagatgcaactctgtgaaagaaaatagagaaaggcagaaatctttatcagacgaagatttctgaatagggaaggacagaaatgaaattaggtatcgttattatttgcctgatttcatgtatgtccgtataagtcgttaaaagcctttaaatgctgatagctagagcatttagcggatttccgacttggttaaaactctatataaattcatgtaagtttttgaaaaatggcccactttgtggcccactattttttgaatgattttattaaagtcctaatacagtagaaatgatggaaagtttttaagtggcaaaatgtatggtctaaaaggagcaattgtcattgaatttaagaccgtgatatacagcgacaaaaaatcggaaaatatgtaaagagtagtaggaagactcataaggtacgattaaagagaaaaaggcctcttgatcatgaggaaaaaataaggtaaaaagcattctgtgataaagtataaaggcttagaggagaaaagtatcttctaagctttttttaattaagaagcagtttgaacgtatgcttttgaattaataataagtatagtaaaatttgcactggaaggaacagaatatggaatgcttgtagaaggtgattttggcagaatgacttttcaatgagatatttgtcgtttgaacgataatttgaatttaatgaaataatcgtagatggtaacttacaaatgagtaaactatcagtcggtttactgatttatcagtttacgatatattatgagatgaaaggaggggacttatggatgctatgaaaacaggctgttttattgcaagaaaaaggaaggaaagaaatatgtctcaaagagaactggcagaatatttacatattaccgacaaggccataagcaaatgggaacgaggactctctttccctgatataacaattttaattcccctttcagaaatactaggggtaagtctatatgatttattaactggaggtagcaacaatgagtaaagaaaataatgaaaaaattgtagatgaaattatagaatatgccaacaatgaaattgagaagagtaaaaaaaagcatgtaataattctcctttcggtactgacaggtgtttttatggtctcagtcatttttttgttagtattcacatttgtcggcggatttgctaagtggttcttttttggtatgactgcaattataactgcaatattaaatgttatatggacattacggaatcgagaagcaaaatggtttagattttgcagtttatcatttactgtgttcaccttatgttccttttacgctgaagcggcccattggattttggttgaagattggagtgctttgatggatgtggttccaatcacttcgaatatattgtggtttcttactgtggtttcagtggctatcaatagtatttctttgtttacgagaagggatagataattgaatattagtagttttgatactagcaaggtaacagatatgatagatatgcttcatgtctgtcacaaatttaatactgttattattcgactgatttcatgtatgtctgtataaggtatggcttgctttttcttcactatgtagaaaagtaaggtataattacattagtgagacaaattgaaagttgtcaaactgaaatgtaaagggaggaacatgtgaatgaaaaaaattggaatagttttgttcatacttatttttctaacaagtacattgttaggatgcggaaaacaagatgtgaatatcgatttagaaaccattgatgtgtcagaaataaaaaaaattgaatgtataggaactacaggtgggatagatggtgattattcgtattctttttcagataatgaagttgttgagtttgtagatctattgaatcaagtgaaacttggcgacaaagtagatgaaaataaagcattatcaaatggagctgttgcttattatacaatctattttgcaaccgataaaacactgacaattagtccggggaaatattttataattgaggatacattttatgagtttaataattatgatgaattgtgggatgaatttatagcatttaacagtgtaaaataaacttcgaaaaattctagttgacataactgagaaacactgtaatgatgtatggaaaacaaaatataaaacactctactaagtaggttgagctaaatgcccctatgatttcgattttgaagtcataggggtatttttttgtgcagaaaaataaaaaatttccttttccaccctgtattttcccctctgagcctttcgttatatgaggacaaaaaaataaaattccttttttatttgtaaaaagccctctctacgttctgatatatgaggaacaaattacatttgccttaaaagaatcgggcctgattcaagaacaaagaaaaaaacgaaaagagaaaggagaaattacatgaacaaaacaatcttaatgggaagactgacaaaagatccggaggtgaaatatctccaggatgaaaatagtactgctatggcacgatacacgctggcagtagacagacgatatcgaaaggatggaaaggcagaaacagattttatttcctgtgttacctttgggaagaatgctgagtttgcagaacaatatctgaaaaaaggtttgaagattttagtaagcggacggatccagacaggaagctatgtgaatcaggaggggaataaagtttatgccaccaacgtgattgtagaagaacattatttcgcagaagggaagaaactgtcaggatcagaaaagaaagaagataccgatccagatggatttatgcatcttccagacggagaagaacttccgtttgagtaagaaaaactcggatgctgaaagcagaagagcgcacttatataccttaaaaggtatgtgcgtcctacggaagtagcatctttctgaaggggaattccgaaagtgttggcggatgatccatccgaagaagggttccccttccggcagaaatgcctatcccgtaacagagaaaatggaagagttgaaaaaggaggaaaagaacgatatggcgaagaagaaaacatttcaggaatatacccaggaagcactttatgagattgaaaaaacagaagctgcattgaaacaggcaaagcttgagaaggaacaggcagaacacaggatccagagatccttgaattatctggatacacagaaaaagaaaaaacgaaaggcacgaactcatctgttgatccagaaaggagcagccatagaagcaatctgtaaagataccaaatatctgacagaggcggaattttatcagctgatggatgaacttcttcatgatcccgcttgtaagttttgtgatgtcgttcatgaaatggttcgtggacgggcggaagcggcagaagcaaaggaacgagaattcgcagaagaggaagcactattaaagacgatgcaacgaggtgaattgccacagggagatgagtaagatgggatgttatcactttcatctgaatcaattatccagaggaaaaggacagtctgccattgccagtgctgcctatcgggctggtacaaaattggaatgtacgtattatggagaagtaagtgattatacgagaaaaggcggtgtggtattagcggagattcatcttcctaaacaggctccggagagattcaaagacagggagaccctttggaatgaggtggaatggatcgaagggaataagaaagcacagctggcgcacagctttgatattgccttgatgaatgagttttctatggaagaaaatattgagcttgcaagaagatttgtggaagaacagttagttgcaagagggatgatcgcagatctagcaatccatgatccgaagaaggcaaaggataaaatccccaatccccatatgcacatcatggtgcccattcgccctttacaggaagatggtacctggggacaaaaacaaaaaaagattccagtattaacaccggatggacagccggttttgaatcagaaaggacaaccggtatttcgggcggtacatacaacggattggagcaggaaagaaaccttggaagaattgagaagtgcctgggcgaagatgtgtaacgaactgtatgaagaaaaaggactaacagaaagagtcgatgccagatcttatgaggaacgggggattgataagatcccgatggtgcatgaaggaccgaatgtacaggcaatggaagcaagaggaatttcaaccgctctgggaagtttaaaccgactcatccgagccttaaatgatatgaaagaatgggcaaagaatcttcttcaatggtctttgcttcgacaaagccagttgatggaacggatgctgttcttacatcagccaactttagcggattatctaagaagctattacgacaagagaaatgcagtcgcagaatcctacgcttatggaacacaaaaggcgaagaatacaaatctgaaacaatttgcagagacgatccgctttctggaagagcaggatgtgagaaccccagaacagctgacagagaaaatccaggaattagatatacagctgaatgaggtgagtcagcggttgaatcaacaactgtctgctctgcgaagtatcaacagcaacctttatgcaatgaaagagtattttgaaacgagatctgtttatctggaattaaagaagaaatattttggcagggaaaaattcaaagaggaacataagaaggaacttagcggatattatcgttcggaaaggatcttaaaagaaaacctggacccaagtgggaagattccggaaggacaatggaaacgagaagccgctagtttatcagaagagatagctgctttacgaaaagaagataaacggatccatgcgatgttacgaaagtatgagggaatcaaaaatcatgtggaagctttgatggcagaggaaggagaaggtgtctctcttccagaaacaaacaagcgggagcaatccacagaaacaaaagaagcagtgagaaccatgaaacgaaagaagaaacattatggaatggaattataggaggaattttagaaaatggaagaatatacaagagaacagattcaaagagcagatgatacagatttatatgtttttctttctgggagaggggaacagttcaaacgatgcgggaaggaataccgatggttgcgacatgacagtgtgatgatcaacaagaacgaatggtatcgttttagtcagaataaaggcggtcatgccatcgattttatgaaagaattctacggtctttcttttgcagaggcagtcaaagaattattaggagaagagggagttggagaaaccaacagaagaacggcgaaggaagatgcaggcagacagagggtctgccccatccccttgcctggattggaactgccagaaagaaatgaaagctgtgagatcgcaaggaagtatctcattgaacagagaaaactatcggaacatttggtggatcagatgatcgaaaagggagatatttatgaaagcaaagcatatcacaatgtggtgttcgttggaagagacaaagaacagaatcccagatatgcagctatgcggggaaccgatgagaaccgatatcgtggggaagcaaaaggttcggaaaaagcctatggatttggccatgtaggaacggatgaaaaactgtttgtgtttgaatctcccattgatcttctgtcttatatcactgcagttccagaagaatgggaaaagcatagttatatttccctgggaggattgagtgaaaaagcaatgaaacggatgtatacagaatatcctcatatccattccatctacttgtgtctggataatgatgagcctggaaatgagagatgcaggcagtttgtttctcttattctggaggaactgagtgtgtaccgattagaaccggtgaagaaagactggaatgaatgtctggtagcagaagttccggtagaaaatatggcaaagcagatgtgttggagagatgccagggaaaaaccagttccggtcatgaaaatgtcggaggttgaggaaacggtggtccagtggttatggtatcccttcattccctttggaaaggttactttgatccaggggaatccgggaaaaggaaaaacgtggcttgcaatggcaatcgccgcatactgtacaaatggaaaagaacttcccaatgcacttcccatagaaccctttaatgtgttgtatcaaacagcagaggatgggatagcagataccattaagcctagattagcaaaatgtggtgcagatatgacaagagtacgcttcatcaatgaagatgaaaaacagctttctatgacggacgatcggattgaaaaagccatccgacagaataatgtacgcctcatgatcatggatcccatacaggcttatctgggagccaatgtggatatgaaccgggcgaatgagatccgtcccttatttcgacatctcagtacgattgcagagagaactggatgtgccattgttctcattggacatttgaataagtcatcgggaagtcagagcgattaccgttccttgggatccattgatatcgcagcggcagtacgaagcatcttatttgtagaaaaggtggaaaaagagaaggaacaggatatccgagtggtatatcagcaaaaggattctcttgctaagaaggaaaatccggtagcgttttctttaggagaagaaggcttaaaatggttaggagaatacgatatatccattgaagatctgctgatggggaaagcaggaacgaaaaaggaaacaaaactggaaaaggcacagaagttgatcctggagttattgaccaaacgaaaagtaatgtgtttagaagaattagaggcagaactacttgcttatgggatttcttccagaacaggaagagatgcaagaaagcagctggaaaacagactgagctacgactggtgtcagggaagaaaaacagttgcgttgacaacagaataaaagatgacattggcaaaaaactactttggcattggcagtctttatagatacctttgccagccgccaatgtcaaagatatttaccatttatttcaaaaaatggtcgtgtgtattgcgaggtgaaatttatgctatgcacgtaaaacagggaaaggatattatgaataaaccatatgtaccgatttatgaaaaggtggctcttacaattgaagaggcagctgaatatagtaatattggacaaaatagaattagtaatttattaaaagagccacgatgtccatttgtactttatgtaggagctaaaaaacttgtaaagagaaaagaatttgaaagatttatttcggaaaatatagagatttaagagataggagatgagatggaaattgaatattcacaaagataaaatggtatggtataatataagatactgtattagggcttctttgaaaggagctaaaatatgggaaaagatttaaaaggcaaagaacttggtgtgggtatatcacaggaaagtacaggattatactccgcaagatttgtagatcggtttggaaagagaaagcataaacgattcaaaaagctacaagagtgtagagcttggcttgcagatgcgatttatgtagatgaacatagtgatatttcaatgccatctgatatgttggtggatcattggtttgattactggattggaataaagaagaaaacagtccgtccgaatacggttcgtaattatacggagagatatataagaaatattaaaccattgattgggaaaatgtcattatcagatgtgaaacctctacattgtcaaaagatattttatgatatggcggatcaaggctatcgtacgtctacgatttatcaagcaagaattacattatataatatgcttgaatatgcaaaagaaaatgaagtattacgaacgaatccctgtaaaaggtcagtaaagagtgatatgggaaaaccttcggagaagaaagttgcattagaaagagatgtgcaaaaaatatttttgagatatgcagaagggcagagttatgaaaatcagtatcgatttattcttcaaaccggattgaggacaggcgaattagttggattgaaatgggaagatattgattttgaatctaaaacaattcagattcgcaggagtatggaataccgttatagtgtaaaagagtggcgtattggagaaccaaagagtaaatcaggttatcgtacgatacctttaacagaagaagcggttgctatactgaataaacaaaaagaaaagaataagtggatttcagaaatttcaaaagaatgggaagagtttgtgtttctgtgcagaaaggggacaccagttaagaacagtacatatgatacggcattgtttaagatttgtgacaaagcacagattcctagattttcaatgcatattttgagacatacatttgctactagatgtattgaagcaggtatgaagcccaaaacacttcaaatgctactgggccattcaaatattggaattaccatgaacttatatgttcatactaccgaagaagaaaagaaaaaagaaattgatttggtagcagaagcgcttatggcaatatgatggcccactaaatggcccacctattaaagtaagtatgctgaaatcccttgaaatctaaggatttataggaggaaatagaagaaatgaaactaggtatcgttggattgccgaacgtagggaaaagtacattatttaactcattgacaaaggcaggggcagagtcagcaaactacccattctgcacgatcgatccgaatgtcggcgttgttgcagtgccggatgagcgtctggaagtgcttggggagatgtaccatacaaagaagattgttccggcaacgattgaatttgtagacattgcaggtttggtgaagggagcttccaaaggagaaggtcttggaaatcagtttcttgcaaatatccgtgaggtagatgcaatcgttcatgttgtgagatgttttgaagacgagaatattgtacatgtagatggaagtattgctccgcttcgagatattgagacgatcaatctagagttgattttctcagatattgagattttagagagacgtatcgcaaagacgacaaaaattgcgagaaatgacaagtcagcggcaaaagaacttgtattgttagagcggctgaaaggatatctcgaagaaggaaatatggcacgcagctttacggctgaagatgaggaagagcaggaatggctggaaagttataatctgttgacttataaaccagtaatttttgcggcaaatgtgacagaagatgatcttgcaaatgacggtgcagacaattccggtgtggcagaggtcagagcatacgcagagaaagagcactgtgaagtgtttgttgtatgtgcacagatcgagcaggaaatcgcagagttagatgacgatgagaagaaaatgtttttagaagatcttggactaagcgaatctggtttggaaaaattaattcgtgcaagctatagcctccttggacttttaagttatctgacagctggagaacaggaagtcaaagcatggacgatcacaaaaggaaccaaagctccacaagcagcaggaaagattcattccgattttgaacgtggattcatccgtgcggagatcgtaagttatgatgatctgatggcatgcggtacttatacgaacgcgaaagagaaagggcttgtccgtctggaaggaaaagaatatgttgttcaggacggtgacattattttattccgtttcaacgtgtagaaagccagagaagggagaggtagtatgaatatgaatatcaattttccgcatttgggaatcgaactggaacatgtgggtcggtccatatccattttggggtttcatattacatactatggaatgctgataggtctggcgcttgtcgcggggatttttattacgatttattttgcagtaaagagcagacaaaatattgagcattatttagatcttgtgattgggacggtgctttggggtgttgtcggggcaagactctattatgttctgttttcgtgggacaggtatcaaggacatttctttcgtattttcaatttgaggcagggaggacttgcattttatggagccttgatggcagcggtactttttacagttttctatgcgaaacggaagcgggaaaactcgatgcgtctgttagatacggcaactgttggtctgattgcaggacagattatcgggcgattcggtaatttctttaacagagaatcttttggcggatatacagatggactttttgcaatgcagcttccggtcgatgctgtgcggaccgcagatattacagaaaagatgcgggaacatatcgtagagctggaagggatttcttatattcaggtacatcctgcatttttgtatgagatggtatggaacattctgattcttgtacttgtgcttctctattataagaaaaaaatgtttgaaggggaactgtttttaatctacatagcattatatggaatcgggcgtacatggattgaggcactccgtgtggacaaactccatcttccttttggaaatcttccggtttcactgatttttgcagttgtttcagcggcggtaagcattgtgctgatcatacattttagaaaagaagtcgagcgaaagaaacagatggaaaaaagaagacagctccgcagagagtgtgagacagagagacattaacagaatagattgtgagagaaaaactcctcaccggaaacggcaaagaaaagctgtggaaggtggggagttttttgggaaaattctcttgtattttaaaaggaacaaattcctactggacttttgtatacaagaggaatataatatgaataaataggaaaaaacctagaatttgaaggaggaaaaaaaccaatggcaagaaaaatgaagaccatggatggtaatcacgcagcagctcatgcttcttatgcatttacagatgttgcagctatttatcctatcacaccttcatcagttatggcggaagctacagatgaatgggctactcaaggtagaacgaatatttttggacagacagttcaggtaacagaaatgcaatcagaggcaggtgcagcaggtacagtacacggttccctcgcagcaggtgctttgacaactacatacacagcatctcagggattattacttatgattcctaacttatacaaaatcgctggtgagcagttaccgggtgtattcaatgtttctgcccgtgctttagcaagccatgcattatcaatctttggtgatcactcagacgtttatgcatgtcgtcagacaggatgtgcgatgctttgtgaatcaagtgtacaggaagttatggacttgacaccggttgctcaccttgcagcaatcaaaggaaagattccgtttatcaacttcttcgatggatttagaacatctcacgagattcagaagattgagacatgggattatgaagacttaaaagatatggcagacatggatgcaattgctgaattcagagcacatgcactgaacccaaatcacccatgccagagaggttctgctcagaacccagatatcttcttccaggcaagagaggcatgtaacccattctacgatgctatgccggcaatcgttcaggaatacatggacaaagtcaatgagaagattggtacaaactacaaattattcaactaccatggagcagaagatgcagaacatgtaatcatcgctatgggatctgtatgtgatacaatcgatgagacagttgattacttattagcagcaggaagaaaagttggtgttgtaaaagttcgtctttacagaccattctctgcagaagctctgatcaatgcaattccagaatctgtaaaacagattacagtattagatagaacaaaagagccgggagcgcttggagaaccattatacttagacgtagttgcatctttaaaaggaacaaaatttgatgcagtgcctgtatttacaggacgttatggattaggttccaaagatacaacacctgctcagatcgttgctgtatatgacaatacagaaaaacagaaattcacaatcggtattgtggatgacgttacaaacttatcattagaagtaggtgctccgttagtcacaacaccagaaggaacaatcaactgtaagttctggggacttggagcagatggtactgttggagcaaataaaaactctatcaagatcatcggtgacaacacagatatgtacgcacaggcatattttgattacgactctaagaaatcaggcggtgtgacaatgtctcacttacgttttggtaagagcccgatcaaatctacatacctgatcaaacaggctaactttgtagcatgtcacaatccatcttatgtgaataagtacaacatggtacaggaattagttgacggtggtacattcttactgaactgtccatgggatatggaaggacttgagaaacatcttccaggacaggtgaaagcatttatcgcaaatcacaacattaagttctatgtgatcgatggtatcaagattggtaaagaaatcggacttggcggacgtattaacacagttctccagtcagcattcttcaaacttgctaatatcattccggaagaacatgcaatcgaattaatgaaagcagctgcaaaagcatcttacggtaagaaaggtgacaagatcgtacagatgaactacgatgcgatcgatgcaggtgcaaaacaggttgtagaagttcaggttccagaaagctggaagaacgcagaggacgaaggcttatttacaccagaagtaaaaggtggaagaaaagaagttgttgacttcgttaagaatatccaggcaaaagtaaatgctcaggaaggaaatacacttccagtatctgcattcacagaatacgtagatggttctacaccatcaggttcttctgcatacgagaaacgtggtattgcagtagatattccggtatggaaaccagaaaactgtatccagtgtaaccgttgtgcatatgtatgtccacatgcagttatccgtccggttgctcttacagaagaggaactttcaaaagctccggaaggaatcgagacaatcgatatgatcggtatgccgggaatgaaatttacaatgacagtatctgcttatgactgtacaggatgtggctcttgtgcaaatgtatgtccaggtaagaagggtgagaaagctcttgtaatggaaaacatggaagcaaatgctggaaaacaggaatacttcgatttcggaagagagattccagtaaaaccagaagtagttgctaaatttaaagaaacaacagtaaaaggaagccagttcaaacagccattacttgagttctcaggagcttgtgcaggttgtggagagactccttatgcaaaattaatcacacagttattcggtgacagaatgtacatcgcaaatgcaactggatgttcttcaatctggggtaactcttcaccgtctacaccatacacagtaaacgaaaaaggacagggtcctgcatggtctaactctttatttgaggataatgcagagttcggttacggtatgttattagctcagaaagctttaagaaacggcttaaaagcaaaagttgagaagttagtagagagcggagacaatgaagcagttgttgcagcaggaaaagaatggttagagacatttaactgtggagctacaaacggaacagcaacagataaccttgttgcagcattagaagcttgtgactgtggatgtgaattgagaaaagaaatcttacagaacaaagacttcttagctaagaaatcacagtggatcttcggtggagacggatgggcttacgatatcggatttggtggagttgaccatgtattagcttccggacaggatatcaacattatggtattcgatacagaagtttactctaatacaggtggacaatcttcaaaatctacaccgacaggtgcgattgctcagttcgcagcaggcggtaaagaagtgaagaagaaagatatggcaagcattgcaatgagctacggatatgtatatgtagcacagattgctatgggagctgatttcaatcagactgtaaaagcgattgcagaagcagaagcttatccaggaccatctttaattattgcttacgctccatgtatcaaccatggtattaagaagggtatgaacaaagctcagacagaagaagagttagcagtaaaatcaggatactggcacaacttccgcttcaacccagctgcagaaggaaataaattcactctcgacagcaaggctccaacagaagattacagagaattcttaaatggagaagttcgttacaatgcattggcaagaatgaacccagaaagagcagaagaattatttgcgaaatcagaagaagcagcaaaagagagatatgcatacttgaacaagcttgtaactctctatggaagcgacgctgaatagaacagacaataatgtttttcgaaagagaataaagtcatggaaaagggatacttcagaaatggagtatccctttttgcagaaagtatacaaaaaaagaaaaaaggacagaagaaaaaatagtaaaagtagcaattcctatttagagaaaattgtggtatactaaatgctgtttgaaaagagaattgaatgacaagagatagaggtgcaaggattatcagtacggtacatgagaacacggtggacgaccgatgtaccggaaaggatgaattgccgaagaactgttctttcgtccggggagcaggatctgggtcactgcagaatatgcagtggactgtcacagacatgtggagtgctatcgttggctgaaataaaacagagatgagttagaagttttttgccatgaacgcgctttagcaagttgtcgttcatggttttctttttctaaaaacaaattcgaaattattttaaaggattagagagaaaggagaacttttatgcacgtttcaaagaaaaaaatatggagtgcggcggcatttgtgcttatgtttacactattgctgtcaatgacggtatttgcagcggatggggaggcggcacagccgaagatgtatgcaacattttgggcattgattcccccggtggtggccattgcattggctttgatcacgaaagaagtttatagttcactgtttgtaggaattcttgtgggggcgatgttttattcagacttttcatttgagggaactattgtccacattttcaagggaggaatcatcagtgtgctgtcgaacagttataatgtaggaattcttgtattcctgatcatactgggagcgatggtcagcctgatgaaccgggcaggaggatctgcggcatttggaaagtgggctggaaagagaataaaaactcgtgtcggtgcacaacttgcaacaattgcgctgggaatgttgatatttatcgatgattattttaattgtcttacagtcggaagcgtgatgcggcctgtgacagacagacatcaggtgtcgagagcaaagttatcttatctgattgatgcaactgcagctccgatctgtattattgctccgatttcttcctgggcagcagcagtgacgggatttgtagagggagaagatggtttttccatctttatgagggcaattccgtacaatttttatgcactattgacgattctgatgatgattgcgattgttgtgatgaaatttgattttgggacaatgcggacacatgagaaaaatgcagtaaaaggagatatctttacaactgcgaacagaccttacgagagtggggaggaaattcctgtcaatgaaaatgggaaagtgacagatcttctgattccgattgcatctctgatcgtttgctgtgtaatcggcatgatctataccggaggattttttgacggggttgattttgtaacagcgttctcgaacagtgacgcgtcggtgggacttgtcctcggaagcttctttggcctcgttcttacgattgggctgtactgtgtccggaaggttttgacttttaaagagtgtatggaatgcattccggaaggatttaaggcgatggttccggcaattatgatcctgacatttgcatggaccttgaaagcgatgacagacagtctcggagcggcagcgtttgttgcaatgggtgtgaatcagtttgcggaaggattgatgaacttccttccggcgatcattttcctgatcggatgctttttggcatttgctacgggaacttcctggggcacttttggaattttgattccgattgtcgttgcgatttttgcagagacaaacgagactttgatgatcatttccatctctgcatgtatggcaggagcggtatgcggggatcactgttctccgatttcagatacgacgatcatggcatctgccggtgcgcagtgtgatcatgttacccatgtatcgacacagcttccatatgtcattacggcggcacttgtctcttttgtgacgtatatcattgccggatttgtacagagtgcatggatagcactcccggttggaatcggattgatgatcgtgacattgatggtgatcaagaagaaaacagaaaatcaagaataaaaagaaaacaaacgggagatcgtaaaaatacggtctcctgtttgcgtttgcaagaacacattgtttatgaaatcaaagagatcagattctttttactttcttaatatagaaaataatgatataatgtataaatcggagcggtctgtttgatccgctgctatgataggaaaatacagagtggagagtgatagtatgaagcatacacaattatctgcatacgaacttgtacggaaacaggacgtatcagatttacagtctgtcggctatttattcagacataaaaagacgggagcgagggtgctccttttagagaacgatgatgagaataaggtatttacgattggttttcgtacaccgccggaagacagcacaggacttccgcatattttggagcattctgttctctgtggatcgaagaaatttccggcaaaagatccgtttgtggagctggtgaagggctctttgaatacatttttgaatgcgatgacatatccggacaagacattgtatccgatcgcaagctgcaatgacaaggatttccagaatctgatgcatgtttatatggatgcggttttttatccaaatatctatgagcgggatgagattttccggcaggaaggctggagttataagctggatgaaaaggaaagtgatctggagtataacggagtagtatacaatgagatgaagggagcattctcctcaccggaaggtgttttggatcgtgtcatcttaaacacgctgtttccggatacctcttaccgcaatgagtccggaggggatccggatgtaatcccggaactgacgtacgaacaatttttaaacttccacaagaagtattatcatccgtccaacagttacatctatctgtatggggatatggacatggaggaaaaattaaactggctggatcaggaatacttaagtaagtttgattatcttgcaatcgactcagagattcgtttccaaaagccgtttgagcagatgaaggaagtagagatggcatattcgatcacaagcagtgagtcagaggaagataacacatatctatcctacaacaaggtgatcgggacaagtctggatgagaagttgtatctcgcatttcagattcttgactatgcacttctgtccgcaccaggtgcgccgttgaagaaggcacttgtggatgcgggcatcggaaaagatattatgggatcttacgacaatgggatttatcagccgattttctccatcattgcaaagaatgccaatctggaacagaaggaagcatttattcaggtcgtagaagatacgttgaaagaaatcgtgaaaaatggaatggatcagaaagcgctggaagcaggaatcaattatcatgagttccgctaccgggaagccgattttggaaatttcccgaaaggattgatgtatggactgcagatgtttgacagctggctttatgacgatgaaaaaccatttatccatgtggaagagctgaaaacatttgcattcttaaaagaacagatcggttcagggtattttgaagaattgattcagaagtacattttggacaatccgcacggagcgatcgtcgtgatcaagccggagaaagggcgcaccgcacggttagacaaagaattggcagaacgtcttcaggaatataagaagagtctttcggaagcagaagtggagaagattgtggcagatacgaaagagctgatcgcatatcaggaagagccatcgacgaaagaagaactggaagcaattccggtgctggagattgaggatatttcaaaggaaattgcaccgatttataatgaggaactgcatctggcagatacacttgtcgtacatcatgatgtagagacaaacggaatcagctatctgtcattgatgtttgatctgtcagatgtgccggaagaacagctcccatacgtggggattttacagtctgtaattggaatgatcgacacgaacaactatgcctatggagaattgttcaatgagatcaatatgagcactgggggaatcgggacaagtcttgaagtgtatccgaatgtgacgaaagtttctgagaaggaatttaaggctgcttttgaggtgaagacaaaagcactctatgataaacttccagttgcattccagatgatccgtgagcttttgatggagtcaaaatttgaagatgagaagcgtttggaagaaattttggcattattgaaatcaagacttcagatgaaattccaatcttccgggcatatgaccgcagtgctgcgtgcgatgtcctaccgctcgccgatgtcacaattcaaagatttgacaaatggaatcgcattctacgaaaaagtgtgccagattgcagatcattttaaggaagagaaggcagcactgatcacgaatttgaagaaattatccgaacaaatcttccgcgcagataacatgatcatcagttgtacatccagaaaagaaggattggaagaattggagaaattgatcagagagctgaagaatggaatttatcaggggacagcagaccatactccgtgcattcttcactgtgagaagaagaacgaagggtttcagacagcatcaaaagtacagtatgtagcccgtaccggaaattttatggaggaaggtcttgattacaccggagcgctgcagattttgaaagtaattttaagctatgattatctctggcagaatatccgtgtaaaaggcggcgcatacggatgtatgagtaactttaaccggattggagatggatattttgtttcttatcgggatccgaatctggagaagactaatgaagtatacgagggaatcgcagaatacctcagaaactttgacgtcgatgacagagatatgaaaaaatacatcatcggaacgatcagcaatatggatgtgccgatgacacctgctacaaagggagaacgatctatgaacctctatatgaatcatgtgtcaaaggagatgatcgagcaggagagaaaagaagtattagatgcaaaagtatcagacatccgtgcacttgccgatattgtggaggcagtgttgaaggcaggagatttgtgcgtagtcggaagtgaagagaagattgaagcacagaaagaattatttatggagattaaaaatcttgcataggaaggagaacgaatgagagcagattatagatcaggttttgtcacattgatcggaagaccgaatgtgggaaaatcaacactgatgaattatctgatcggacagaagatagcgatcacatcgaacaagccacagacgacgaggaaccggatccagacagttctgacaacagaggaaggacagattgttttcgtagacacccctggaatccacaaggcgaaaaataagcttggagaatatatggtaaatgtggcagagcgcacactgaatgaagtagatgtggtgctctggctcgtagagccgtcgacatttatcggagcgggagaacggcatattgcagaacagctgaaaaaggtaaagacaccggtgatccttgtaatcaataagacagataaagttaagaaagaagaagtgtttacatttattgatgcctacaagaatatctatgacttcgcggcgattgttccggtttcggcgcgaagcggagaaaatacagatgaattgatccgtgtgatcatgcagcaccttccatacggacctcagttctatgatgaggatacgatcacagatcagccacagcgccagattgtagcggaaattatccgtgagaaagcgcttcatagtctgaacgaagagattccgcatggcattgcagtggcaatcgacaggatgaagatgcgtaagaagattgtagatatcgatgcgacgattatctgtgagcgagattcgcacaaagggatcatcatcggaaagcagggggcgatgttaaagaaaatcggaagcacggcacgctatgagattgagcagatgctggagtgcaaagtgaacctgcagctttgggtgaaagtcaaaaaagactggagagacagtgatttcctgatcaggaactttggatacacaaaggaagattaaacaagaacacaacatgaggtacaagaccagttgtatagtttcattcggaatggacatcctagaagtaaagaaatacgaagggatgattggatgaagaatgcatattgggatcattttgtggagacaggaaaagtagaagattatctctgttacaaagggatggagatttgtcagcagacaatggaattgtataaagacagagaaaaaagtttaggatgggcaggagaacagacaagtgaatcaggcagtgacagtgacaggaatgattttatcggcggccccggtgggggactacgataagagagttgtgatcctgacaaaagaacgaggcaagatttctgcatttgcaaggggagcgagacgtccaaacagctcccttgtaggtgtgacaacgccgtttgctttcggggagatgacgttgtatgaagggaaaagctcctacaatctggtgcaggcagatatctctaattatttttcagagctgcgcacagatatggagggagcctactatgggttttatttcatggaatttgcggactattatacaaaagagaataatgatgagcgcgaaatgctgaaacttctgtaccagtcgctgcgtgcgcttgtaagaaagaccataccttatgaattgatccgttacatatttgaactgaagtcgatcagtatcaatggggaggcgccggaagtgtttgcatgtgtgtcctgtggctcgacggaggaactggaagtgttcagtgagtctgggcaggggatgctgtgcagcgagtgctgccacgaggtcaaggatgggaaaagactgcatccatccacagtttatgcgatgcagtatataatcagcagcagtatcgagaagctttatacctttacggtaagtgctcaggtgcagaaagaactgaaacagctgatgaagcagtatatccggcatcatattgacaagaattttaaatcactggaagtactggaagtctgtattcgataaaaggaatgctatttcatactgccattaggaaaaactatcccggattgcttgaaaaaacaaacgggaaagggtataataacagacattaatatcttatttatctgtgggtggaaactgtcatggatgaagagaagagagtgaggtagatagttatggagaagacaatggacaaaatcgtggccttagcaaaatcaagaggttttgtatatccgggatctgagatctacggtgggcttgcgaatacatgggattatggaaatctcggtgtagaacttaagaacaatgtaaaaagagcctggtggaaaaaatttgttcaggaatcaaaatataatgttggtgtagactgtgcgattctgatgaaccctcagacatgggtggcatccggacatctcgggggattcagtgatccgcttatggattgtaaagaatgtaaagaaagattccgtgcagataagctgatcgaagatttcgctcaggagcatgggattgaattaaaagacagtgtagatgcatggtcacaggaagagatggcagcatggattgaagaacataacgtaccatgtccgtcctgcggaaaacataattttacagatatcagacagtttaacctgatgttcaagaccttccagggagtgacagaggatgcgaaaaacacagtatatttaagaccggagactgcgcagggaatctttgtaaactttaaaaatgtacagcgtacatccagaaagaaaattccgtttggaattgcacaagttgggaaatctttccgaaatgagatcacaccagggaacttcacattccgtacaagagaatttgaacagatggaattagaattcttctgtgagccgggtacagatttagagtggtttgcatattggaagaaattctgtcttgactggttgagttctcttggattgaaagaggaggagatcagagtcagagaccattcgccggaagagttatgcttctatagtaaggcgacatccgacgtcgaattcttattcccatttggatggggagaactctggggaatcgcagacagaacggactatgacttgtcacagcatcaggaagtctccaaacaggatctgacttactttgatgatgagaagaaagaaaaatatattccgtatgtcatcgagccgtcactgggagcagaccgtatggttcttgcattcctttgcagcgcatatgatgaagaagagttggaaggtggagatacccgtacagtgatgcatttccatccggcgcttgcaccggtcaagattggtgtgcttccgctttctaagaaattaaatgaaggcgcagagaaagtatttgcagagctgtcaaagacttacaattgtgagtttgatgaccgtggaaatatcggaaagcgctatcgccgtcaggatgagatcggaactccgttctgtgttacatacgactttgagtctgaagaggacggagcggttacagtcagagatcgtgatacgatggaacaggagcgaatcaagatcgaagatctgaaagcatattttgaaaagaaatttgaattttaataggagtacgcgatactcagaatgctatgagatgtatggtgaaaagtaaattttaccatacattgcatatagagaaaacaaaaaggagcgacgacaaaatgaaaagagaaaatcagtggaataactatgatgcagctgaattagaagtgcttgaaaaagtgaatgctgcatacagagaataccttgatgcaggaaagacagagagagaatgtgtgacagagtgtatccgccttgcagaagaagctggatatcagagtcttgaatctgcgattgcaagcggagtaaaattacagaaaggctcaaaagtttacagccagtgcatgggaaaatctatcgtattgttccagctcggagaagagcctttagaaaaaggtatgaatattttaggagcacatatcgactctccacgtattgatgtaaaacagaacccattatgtgaagacaatgagtttgcttatttagatacacattactatggcggaatcaaaaaataccagtgggtagcaacaccacttgcacttcacggagtcgtagtgagaaaagatggaacaaaagttgagatcgtaatcggtgaaaaagaagatgatccggtacttgtgattacagatcttcttgtacatttatcaagagaacagctggataaaccggcaagaactgtgatcgaaggtgaaaaattagatcttctgattgccaacaagccattagaaggagaagaaaaagacgctgtcaaagcaggtgtattaaagttattaaaagagaactacaacatcgaagaagaagacttcctctcagcagagcttgagatcgttccggctggaaaggcaagagaatgtggaattgacagaagtatgattatggcatacggacaggatgacagagtttgtgcatttacatctttactcgcaatgttagagacaaaagatgtgaagagaacagcatgctgtatccttgtggacaaagaagaaatcggaagtgtcggagcaactggtatgacatctaaattctttgagaatgcagtcgtagaactgatggatgttgtggaaggatattcagaagtgaagttccgccgtgcaatggcaaattctaagatgctttcttcagatgtaagtgctgcatttgatccgttatatgcagcaagcttcgagaagaaaaattctgcattctttgcacacggtcttgtgtttaataaatatacaggaagcggcggaaaaggtggatctaacgatgccaacgcagaatatgttgcagaacttcgcaagatcatggatgacaacaacgttgcattccagacagcagaactcggtgcagtagacgtcggaggcggcggaacaatcgcatacgttcttgcaagacatgtcatgaacgtgatcgatagtggtgtggctgtactttgcatgcacgctccatgggagattacaagtaaggtagacgtatacgaagctgtaaaaggatataaagcattcttaaaagatgcataagatcaggaagcaaaggcagagattgctaaaatagaatagaaaatagaaaatagaaatcccctctttttagaagcactgtgaaagcggtaaattctaaaaaggggggagtttacattaggcgaagaacttatggatgcagcttttcttttgttgaatgcgagaatgcattggagattccctttaccgaagaagaatattccagtggggacatcccggttgctttcttgaattgtttggagaaatactggagggaactataagacaggtaatgagcaatctctgtgaagttcattgttccgatccgaatgatttcttttgcgtattcaatcttcatctgactgaaatattcgatcgcaccgcagtttttttctttgtggaacagtgcctgtaaggcagaacggctgatcgagaattgggagcagatcagtggaattgtcaggtggtcgcagatatgttcttccatataagtcgaaatctgttgaaactggttctgttttgccgtaatattggcgggagattccatgagcggtggttcaggagaatgttctaactgaccggaggaggatctgtttcgctggattgtgatcagaaacagttcgaggtaaagggtgatcaattgctgtgcgccaaaaggagcttcctcggaaatatgaacttgttcgatgcgcggctcatgaagcggggtagaaaatgcaagtcttgcctcagcaatgatctgtgagatgatcgtacgttcttctaaagtcagagtggtgtgtagtttctggaacaagtgcatggcgggtgaaaagcagtagaaggagatcgcgacaaggtttggagctttttcgccaatggactcaaaggcatgaaattcatttggtcgatgaaagataatgtcccctgcgtggagtgtgagccattcattttctgcgcgaacagatacttctcctttatctacatagagtagttcccaaaaatcgtgagattctccttgaaagacgaaatttttcatatattcaaaatagtgtatggtgacaatgctctcgatattgatttcttttttcatgcgtgtactgacatatcccattgtatctttcctccagtgtgatcatttgccggttgcaaatgattctcagtgattgtttttttgaaataggttctgttttttacttggttattctatcagaaattggataataagacaataagcatagatgataaaataagcggttttccacagaacaatatataatagatagaagagatgttgttattgttcgctgtgtgaacggcagcaggaatcataaagaaagagagggtataaaagttggagaacatttatacaaaaggaacggagatccgctttgacgagagcagattgtcatttacgatcacacatgaaggagatagctggaactggggagaaggattccgtccacgcatggaatgtgaggaaggaacaatctattttgcagatgcgaagaagatttcacatgaggagtggaagacgggaatcggacatggaatcttaagccattttgagggatttgagttaaatggagcagatgcaggcatcgcatttgacacaatcgtatggatcgaagaggtgtcaggagatgtattttttgagtgggtgccactttccacagagacagttaaagtaaaatccgtgtactggccgggatacatggagtttgatgagaagaaagacagctggtatacacttttgaactggcaacagggattgctggtgccaaatacatggaaaacagcagtggataaagttgtatttgatggttttatgggaactgcaggtgcatatatgccatggtttggacaggtgaaggatcgcgcaggatatattgcaatttgtgaacagccgtggaatgcagcatattatacagaacatccggcagaaggaccatacactcatgtgggaatccgctgggagccaagtctgggcaagatggattaccgccgcgtgatgaaatacagctttgtcaaggattgtgattacaatgatctctgcaagatttacagaaactatgtgatcgaaaagggaagattcaaatctctggcagagaaggcagtgaagactccttctattgatcaactgatcggatctgcatttttacataagggaattaagacacaggtaatgacaaactctgatttctatgatgcagagaatccggataagaacaatcatctgacgccattctccgtgagaacagaagagattaaaaaattccatgaacttggtgtgggaaaattatacctgcatctagatggatgggcagaaccaggatatgataatcagcacccggattaccttccagcatgtgagaaagcaggcggatggaaagcgatgaaagaactgtccgacacgatgcatgaatgcggatatttatttggaatccacgaccagtacagagattactactacgcagcaaaaacatttgatgagaattttgcgacacgtctcgcagatgggacaattccaagtcatgcgcgctgggcaggaggtccgcagacatatctctgtgcgacacaggctccgttttacgtgaaacgaaactttacagagatcatggacaatggaattaaactggattgtgcttacctggatgtattcacatgtaatgaaggggatgagtgttctcatccatggcataagatgacaagaagagaatgttacgaatacagaaatacatgctttgagtatcttctgtcaaaaggaattcttccaagttctgaggaagtgaacgactgggcaatcccaagtctcgtattttgccattatgcgccatatgacttcatgctggatcgaccgggaagtccaaagaaaggaattccggtgccgttatttaatcttgtttatcatgactgcctgattgagccatggatgatggacaaggtaagtgaggaagaagactacatgctgtatgcagtgttaaacggaggtgctccatatcttgtgagagatggtgcatatcagaatacagacggttctttcgcaggaggagtggaaattagcatcgaagatcagattaagagatgtaaagtcgtatcagatctgcatgagaaagttgcgaaatgtgagatggtgcgccatgagatggtagatggaaatccagaagtacagagaacaacatttgctgacggaacagttgttacggtagatttccaggcacagacataccagattcgataaaaacagagacagataagtacaaaatgagaaaagacaaggaaatagatcaaaaaagatcgaagggattccttgtcttttttgattcaatttttacaaaaaggctgctttgctgtgcagagaaaaatctgtctgttgaatttgacgaatgcaggaaagactaaggatgagcaggagcagagaaaagtaagacggattttgaaaacatttctcgtcaaaatggacagaggagaacagaaaaaggaatataaaatgtcctaaatgacaaatacaggacaataagacaagtttaggagattatcttgtaagcatttatgtgcaataaaatatataataagaataaataaagaacaaatatagacaacagacaaccaagaatcgagtattcaaacaaacttataacagaggagaagaaagatgagtaagagaataaaagttgcgctggcagggcttggaagccgagggaaagatacatatgcaccaacggcaaagctgtttccagaaaagatggagattgtggcaattgcagatattgatccagagaaagtaaaagcggttgcagcagaatatcagattccggaggagatgtgctttcagagtgcggaggagatgattgccagagaaaaacttgcagatgtgatgtttattacaacacaggacagacaacatgtgggacaggcaattccggcattgagaaaaggatatcacctattactggaaaaaccgatttcgccggatctggatgaatgcagagagattgtgaaggttgcacaggaatgtgatagaaaagtaattgtctgtcacgttctcagatatactccattttatacgaagatcaaagatctgatcgatgaaggaacgattggtgaaatagtatctgtgaattcggtagaaaatgtagggtattggcatcaggcacacagctttgtcagaggaaactggagaaattctaatacgacaagtccaatgattcttcagaagtgctgtcatgatatggatattttattatggctgacaggaaagacttgtaaatcggtatcttctttcggaaatacctatttgttccgggaagataaagcaccagaaggagcggcgcacagatgcatggacggatgtaaagtgaaagatcagtgtccgtatgatgcagagaaaatttatattacagatcctgtgacaggtgttcaaaatggaaatacagactggccggtcaatgtggtggcacttcacccaacagtggaaagtgtacgcgaagcaattcagacgggaccgtatggacgatgtgtatatcactgtgacaataatgtagtagaccatcaagttgttaatttaaacatgacagatggatcgacgatcagccatacaatgtgtgcgtttacggcacatacagctgccggaaatcgatatgccaagatcatgggaactttaggtgagattatcgccgatatgggagaaaataccattcaagtcaatgtgtttgggaaagaaccggaagtgatagatgtacgcacgctggcaactgatttctcaggacacggcggcggcgacaaccggatgatcgaagaatttcttgatatgttgatcaatgagtcaggcccgacaaagagcacaacttctgtggaacaatccgtggagagtcattattgtgcattggctgccgaggaatccagattaaacggcggagcagtaatcgaactggatacttatagaagatagtatataatacaaatttgttaccaggcggcaaataactgccgcatgatataaaccaaaaggaggatgatttcaatgaaaaagaatctgaaaaaattagtagctttaggattagttgcgacaacaggaactacattgttagctggatgtggtggaagcgacaaaggcggaagcaaagatggaaaagttgagcttgtgatgagtgtgtgggattctgaccaagagccggttatgaaacagatggcagaggcatactcaaaagaaaatccaaatgtaacagtgaagacacagcttacaacatggaatgagtactggacaaaattagaggcaagcgcaacaggtggatctgctccggatatcatcactatgaacgtgcttcatgtagaagaatatgcagacgcaggaattttaatggatttaacagatgcagagaaagagtcagacttaaaggtgcatgataatttcccggcaccactggtagatggatatacagtagaaggtaaattatacggaatcccgaaagatttcgatacaaatgccgtattctacaacaaagaaatctttgatcaggcaggagttgcttatccaacagatggatggacatttgaagatttcagaaaaacttgtgaagacttacaagcagcagggcttccggacggagtttatccgacagcaattaaccgtaactccggacagactacatatgatgcagctgtattcgcaaacggtggatatttcttaaatgaagataacacagaaacaggatgggataagaaagagacaatcgaaggtatccagccatggttagatcttgtattagacggactttcaccgacattacagcagatgacagatacagatccagacagtatgttccagggtggacagttagcaatgtacttctcaggaaactacatgattccttcttataataagacattagaaggaaaatacggaatcgtaaaaagaccttctttcaatggtgtagataaagatatcatcaatggtcttgcattctctgtatctgcaaatacaaaacatccagaagaagcaaaagacttcgcattatggttaggaagcaaagaagctcaggaaatccaaggaaaatcaggtacagttatctctgctagaaatgactgccaggaattattcttagatacacataaagacttaaatcttcaggtattccttgacaatgtaccgaacacagaattacttcctcactgtaaagtgactgcaaaactttctcaggttgaaaaaacttacttagagcaggcttggcagggagaaatcacattagaagaggcttgtaagaacattaagccagaggcagatgcaattcttgatgaaatgaacgcaaagtaaagtaggtagatacaaatgggcgaaggaaagaaaaaagtaaggcggaaagcgagcagacgtgagaagaaagactgggtagcaggctacgtatttattgcgccggttacgatcggacttctgatcttctatgtatttccgtttatccagaacttctggttcagttttaatgatgtaaacaaatttaacatggcaaccttctgcggaatcagcaactatcaacgtctgttccaagaaccagatctgatactcgccatgaaaaatacacttttatatgccgttgtgacagtgccgatcgggctggcgctgtcactgttagtggcatccctcttaaactccaagatcaaaggaacttctttttatcggacaatctacttcctgccatcagtaacgatgtcagtagcagtagcacttgtatggaaactgatcttccacggagacttcggtattttaaatacggttcttggaatttttggaatcgaagggcagagctggcttacaaacccgcataccgcattgttctgcgtaatgatcgtggcaatctggggaagtgtcggttataatatgatcattcttcttgcgggtatgcagggaatttcaagatcttactatgaagcagcggcaatcgacggagcaggaccagtaaaacagttctttaagattacaatcccgttactttctccaacgatctttttcgtaatgatcacaggtctgatcggtgcgttccaggtattcgacagcatctatatgatggtcgatccagtaacgaacccggcgttcaacaaagtaaagaccatgaacgttttgttctatcagaatgcgtttatgtatggagaaaaaggttatgcagcagcaatttctatctttatgttcgcagtgatcatgatcatcacagtgatccagctggttggacagaagaaatgggtaaactacgattagaggaaaggaggaaatacgatgaaaaagacatctacaagaaatcatttgcttatacacattcttttgatcgcaggtattgcagtcacagtattcccattcctctggatggtgtttacatcatttaagacattgccggaatctatgcagataccgccgtcaattttaccggaacattggcagttagactcttataaatatgtacttgagattctgccgttcggaaaagtatatatcaatacgattgtggtaaccatcattacggtattggtacaggttgcattttgtacaatggcagcttatggatttgcaagaattgattttccatttaaaaatgcgattttcatgatcttgttatctatcttaatggtaccgggacagattttcttaatcccacagtacttgatcattcagaatttaggattgatcaataccttaccgggtctcttcctcccgaacttgttcagtgcatttggtacgttcttattgagacagttctttatgtcactgccaaaggaattggaagaagcagcattgcttgacggatgtaacagattccagatttttggaaagatcatgcttccgttagtacagccaggtatcgtagcgctggtaatctttacagcaaaatttgcatggaatgacttcatgtggccattgatcgttaacacagatccggctaagatgacattagctccagcactttctacattgaaaggacaatatgctacaaactacccggcacagatggcaggtgccgtaatggcagttattccgatgatcgtactgttcttcatcttccagaaacagtttatcgaaggtgttgcacagtctggtatcaaaggctaaaaatttaatcgaatatgtaatagaaatatcagaagacgaaaagtaaaaaatgcacggttctataatcgtgcattttttgtacaaaaaaacagtataaaaagccaagtgggggagatgtcaatgaaaaaattttattatcttgtgagaatgacatttttggaaaagatggcatacacgaaagcagtgtggtttaatacgattggtacacttgtgtctattttcagttactattttttatggaaaattgtgtttatgggagagaatgaacttgttggatttacgatgggggagatgataacgtatgtcattttgtctaaggttttgtcgtcacagtttgcaggtggaattaatatgcaatttgcagagtgggtatatgaaggaacgattgggacagaacttttacgtccggtgactttgttttatacattatttgcacggcgcagtggagagtttgcatattttattttatggaagggaattccggtttctttcatttctttttttatactgagaggagtaggtccggcaggagccggggaatttcttttgtttttaattagtgtgttgctggcgctggtaattttattttatgtggaatttatggttggactagcttctttttatacactcagtatgtttggcatggcatttacaaagacggcagtattgtccatattatctggcggggttgtaccattagctctatttccggaaggagttgcaagggtatttggacttcttccatttgcgggtatggtatcagttccgttaaatatttttcttgggaaatatagattggaagaatgcatgggatatatgggacttcagatattctggtgtataataatgggagcattagctcatttgttgtatcatatggtgattcggaaagtgattgtccaaggaggatagaagagtgaaaagattgaaatattattttcgattgtatcaggaatttttaagaatagggatgttatgccttgtacaatatccgatggatagtactattcgcttgatttctattattgcgagggaagcagcaggatttcttggcgtatttgcaatcgcaaatgtagttggtactcttggggagtggagtatatatggtgtctgcttgatattttccctgggtgcaatgacggaggctattagccggggacttttagataatgtatggagcattgggagctttgttaggaagggaaagttggatatttttttgatacgtccggcttctgttttgtttcaaatgctgacatttcgaatggaatttgcgtcgttagtcagtttctttctgccgtgttctttgatgatttggtcactcgcaaaatcaggggtagagtgttcgattagtttgatcgcatttttaatcgagtttctcgtgatgggcacaattttgaattcttccctctatttgatttttaatgcgcttaatttctggcttgtccagggaaatgagattgcagatcttatacagacttttcgtgaatttgcaaaatatccgattaatatatttccggcagtttttcaagtgctttttaccgtagtgataccgttcggctttattggatattatccggcaatgtatttacttgggaaaacaaagatgtgtgtaccgatgtggcttttggcagtgacattgctctttgcgctggcatcagtgctcatttggtgttgtggaatgaaaaaatatgatagtacaggtacttaaaaggaatggcgaatcagtgcttataatacaaatgtgatataaatgagaggaattaagaacggtgaagatgatagaagtgcagcatttatgtaaggaatataaaagaaaaatcgtacagccggggttgattggcggagtgaaaggttttttgactccacagtttgataatttttgtgcggtggatgatattaatttccagatagaacgtggagaatcagtgggatatgtaggtccgaatggaagtggaaaatcaacaacaatcaagatgctttcaggtgtacttacccctacgtccggaaaaatcattgtagatgggatagaaccgatcaagaagcggatccagaataataagcagatcggggtggtgttcggaaatcgttcccagttatggtgggatgttcctattatagagtcttttcgtgttctgcaaagactctatgaaattccgaaaccgatatttgatgagaatattgaaaaatttcgagatattttaggactggagaaacttttggatgtgccggagaggcaattatccttaggacaaagaatgcgttgcaatattacggcagcatttttgcataatcctaaaattgtgtatttagatgaaccgacaattggattggatgcggagtcaaaacagcggatacgtgcatttatcaaacagatgaatgaggaaaaaaagacaacatttatcgttacttctcatgatttccaagatatagaagcactctgtaagagaattatcctgattaataaaggaaaaattgttgtggattcggatatggagcacatccgcaaagagtttacagaatttaagcggattacagtggaagtaaagaaaaatgcagtggaaatggctagaagttcaaaagcggcagggatgaatgttaaggttgtagatgattaccatttagaaatcatatatcgtccggaggaaaagaatccaatggagatcatggtagaacttggaaaatatggagagattgtagatatttctattacgggacaggatattgaaagcattatacaaaaaattgtaacagagaataataaggatagaagataaaatgagattacattctggcaaaactatgctatgataggggaaacttaaaaaatatgagtgacaggagaaaaattaagatgaagaagacagtatcgatcttgcttgcaatccttttaggaatgagtatatttgcaggatgtggaaaagggaaggaagaagcctcaaaagatacaacgaagacagaaaaggaaacagaaggtggtgaagagaatcttcttaccggaaagcatcatgtagaaatccaggtgaaggattatgggacgattaaagtggaactggatgcagatgcagcgccgatcacggtgacaaattttgtaaatcttgcaaaggaaggtttttatgacggactgacttttcacagaattatgagcggatttatgatccaaggcggagatccaagaggcgatggcaccggaggatctgatcagacgatcaaaggtgaattttctcaaaacggagtggaaaacaatcttttacatacgaggggtgcgatttccatggcgcgttctcgcgcaaacgacagcgcaagttcccagttctttatcgttcatgaggacagcaaacatctggacggaagttatgcggcatttggatatgtgacagaaggcatggatgttgtagatagaatctgtgaagatgcagaaccgacagacaataacggcacgattccgacagaagagcagccggtcatgacatccgtgaaggtgatagactaaatctcttgcaagagggaatgggagagggaaggaaacgatgagagagacaaagcaggcagagaaagaaactatgccaaaacagcagcgagaaattacagtggaaatcccgggatatcagaaactgaagatgaggtatttgatcctggattataatggaacaattgcattggatggaacattgcaaaaaggggttgctgagcgtttgcaacagctttcagaacagttggaaatctacattgtgactgcagatacacatgggactgtgaggaaattgtgtcagcaacttccggtacaaatacatacatttccgacaagtgaagcggcagaggaaaagcgaaagattgtggaaacgcttggcgctgattactgtgtctgcataggaaacggaagaaatgatctggaaatgtgccaaattgcagggctgtctgttgctgtgatgggagaagaaggaatgtgtgggaaacttggggcaaaagcagatatctgtgtgagaaatattacagatggattggacctgcttttatataccaaacggttgattgcaacacttcgagggtgagagtaagaacagatagaagattctttgataaaaaagtaacaaaacagtagtttttaccaagaaagtccttgactatccgaagtaaaacagataaaatgatatacagatagcgggggaaaccgttattggatatataaaagatgaacgacttcatggcaaaaagtcgtatttttcatgttttatactaaagcaaaatatttttaggaggtcgtttagacatggcaaaatgggtttatatgttcaccgaaggtgacgcaagcatgagaaacactcttggcggtaaaggtgctaaccttgcagagatgacaaagttaggtcttccagtgccacagggattcacaatcacaacagatgcttgtacacaatattatgaagatggaagaaaaattaacgatgagatcatggaacagatcatggacgcaattgttaaaatggaagaagttactggaaagaaattcggtgacaaagaaaatccacttcttgtatctgttcgttctggagcaagagcttctatgccaggtatgatggatacaatcttaaacctcggattaaatgaagaagttgtcaaagtattagctgaaaaatcaggaaatccacgttgggcatgggattgctacagaagatttatccagatgtactctgacgtagttatggaagtcggtaaaaaatattttgaagaactgatcgacgagatgaaagctgaaaaaggtgtaactcaggacgttgacctcacagcagaagatttacagaaacttgctgaacagttcaaagctgaatataaagaaaagattggggaagaattccctacagatccaaaagaacagttaatgggtgctgtaaaagctgtattccgttcttgggataacccacgtgctaacgtttaccgtcgtgacaacgatatcccatattcttggggaacagctgtaaacgtacagatgatggcatttggtaacatgggagagacatctggtacaggtgttgcatttactcgtgacccagcaacaggagagaaacacttaatgggtgagttcttaatgaacgctcagggtgaagacgttgttgcaggtgttcgtacaccacagaagattgaccagttaaaagaagttatgccggaagtttacgaacagttcgtaggaatctgcaagactttggaagatcactacagagatatgcaggatatggaattcacaatcgaagataagaaactctacatgttacagacacgtaacggtaagagaacagctcaggctgctttaaagatcgcttgtgatttagtagacgaaggaatgatcacagaagagaaagctgttgcaatgatcgatcctcgtaacttagatacattacttcacccacagtttgatgctgcagaattaaagaaagctgtaccagttggaaaagctttaggagcatctccaggagctgcttgcggtaagatcgtcttcacagcagaagatgcaaaagagtgggctgcaagaggagaaaaagttgttcttgttcgtcttgagacatcaccggaagatattgaaggtatgaaagctgctcagggtatcttaacagttcgtggtggtatgacatctcacgctgccgttgttgctcgtggtatgggtacatgctgtgtatctggatgtggtgacatcacaatggatgaagcaaacaagaaatttacattagctggaaaagaataccatgaaggagatccaatctctcttgacggttctacaggtaacatctacgacggaatcatcccgacagtagacgctacaatcgctggtgaattcggaagaatcatgggatgggctgataaatatagaacattaggagtaagaacaaatgcggatactccggcagatgcaagaaaagctcgtgagcttggcgctgaaggtatcggactttgccgtacagagcatatgttcttcgaaggaaacagaattgatgcattccgtgaaatgatctgttctgagacattagaagaaagagaagctgctcttgagaagattcttccagaacagcagggagacttcgaagctttatatgaagcattagaaggtaatccggtaacaatccgtttcttagatccaccgttacacgaattcgttcctacaacagaggaagatattaagaaacttgctgatactcagggaaaaacagttgaacagatcaaagcaatcattgattctttacatgaattcaacccaatgatgggacatcgtggatgccgtcttgcagttacttatccagaaatcgcaagaatgcagacaagagctgtgatccgtgcagcaatcaatgtacagaaagcacatgctgactgggatgtttgcccagagatcatgattccgttaatcggagatatcaaagaattaaaatatgtgaaaaaagttgttgtagagacagcagatgctgagattgaagctgctggtgttgaattaaaataccatgtaggtacaatgatcgagattccaagagctgctcttacagctgatgagattgcaaaagaagctgatttcttctgcttcggtacaaacgacttaacacagatgacattcggattctctcgtgatgatgctggtaaattcttagaaggatactacgatgcaaaaatcttcgagaacgatccatttgcaaaattagaccagatcggtgtaggtaaattaatggagacagctgtgaaattaggaagaccggcaaatccagatttacatgtaggtatctgtggagagcacggtggagatccaagttccgtagaattctgccataagattggattagactatgtatcttgctcaccattccgtgtgccgatcgcaagattagctgctgcacaggcagctattgcaaataggtaggagttctctttcctttgaattaccgcttagtttcgagcaggcagcagcctatcgaaaggctaacggacagtatgtaaggaaaaatcaatggagagataccattgtacgggttctcatagaccttaattaaaaatgaaataagataagcgtatcattagaaatagtggtacgcttatttttttacccctattacacatttgagtaccctacccattcttctatataatgaagtcaagaacggaggtgctgacaatgagagaaacaaaataccacgcatatctggatggtgaagaaagaacaattcttttacatagccttgtggaattgaaaaatcaacttattcagcaaggcagatatacagactgtgttgacgagctgattgtcaaagttataaacgcccctgtgaagaaactaaaagtattggtgtaggaggttgtgatgtatgacaaagattttgccgagcttgtgaaaattgcagcggagaaattaaaagaagataccgtttataaaatgctcatacacagcgaggattatcaaaaagaaagcgacgaaagggataaggcggaacgaaactatgaacaacttgatttgacaatggaacagagaaaggtctgtgatgtttttttagattatagagataggcagagcttggaatactctgattattcctatttggcaggcttatatgatgcgttccgtattatggcggtcattttccccgataggtgggatatggagcagatacagaaagctttatccttaattaaaaactgaatatagaagtagatacatagccgattggtgtaacagccagtcggcttttttgcgttcaccgcaacattcagagcgaagtacatagccgcctttgacaaagcggctaaataaaagcgaaaggaggacgctatatgtcaaattgcaaagtgatcgctctgaccaatcagaaaggcggtgtgggtaagaccaccacagccgtcaatctgggcgtgtgtctatcaaagcagggaaagaaagtactgcttgtggatgcagacgcacaggcaaatcttacgatgtcacttggctatccacgaccagacgatttgcccatatctcttgcgacgattatgcaggacatcatcgacgataagccctttgatgttcagaaaggcatcctgcatcacagcgagggtgtggatctgttaccctcaaatattgagttatcaggtctggaagtaaggcttatcaatgcaatcagccgtgagcgtgttctgacgacctgtattaacgaggtcaaaaagaattacgactatgtgcttattgattgtatgccgagcttggggatgctgacaatcaacgcattggcggcggctgacagcgtggttattccgacacagccgcattatctttctgcgaaaggtctggagttattgcttcgctccgtgtcaaaagtcaggcggcagatcaatccccatcttcggattgacggtatcttaatgacaatggtaatgccacgcacgaacatttctaaggaagtgaccgcattggtaaggagtgcatacggtcagaatatcaaagtctttgatgcccagataccacattctatccgtgcagtagaagctaccgcagagggaaaaagcattttcgcctatgacaaaggcggtaaggttgccgcagcttatgagcagtttggaaaggaggtggcagatattggcgataagcagaaaaagcagcatcgagctgaccgcatacgatgacctttttcagacagacgaaagccgtgcagaagcggcattaagtaagataagggatattcccatttctgaaattgatgagtttccagaccatccctttaaggttttaatggatgaggatatggaacagcttgttgacagcattaaaagaaacggtgtaatgacacctgcgactgtccgtttgatgtaggacggattttgcggacattcaaaataaaaaagaatgtggaggtaacagacaatggcaaaatcattatttgaggaactgggcggcaaatacgaaaggcaaggggattatttgataccgtgcttaactgtacccgccgaagaagaacaggcaataggcatctgggggcaacggcatttagattatctaaaacagtaccgtaaagttacatacaccaatcttcttacaagcggcaggctaaacgcctaccttgccgacatcaacagacaggcacaggaacgctttgaaaggctcatagagggtatgaaacaggcacagggcataacggaacagctaaaggcagaaaacgccttagaatggacaggatgcctcaataacataagggcttgtgcgagggagattgtggaaaaggaaattatttttgcataaacagatgattagtggcagggggaaatcctgccgctttttctgctttagtttgtcagcttgacaaataaagggttaaggaatataattagattcagtattatacaaggagttaataaatatgcggcaaggtattcttaaataaactgtcaatttgatagtgggaacaaaaagtagcagtcccgtttcacttttaatatggggcttagttttttgtacccagtttaagaatacttttatcatgtaattttatatgcccgaaaacatataagtgttttggggctattggagttatttactcagtgataggagtatttatcactgggtatttttatgcccttttttgggtgttgataggaggaaaatcacatgaaaataattaacttaggcattctggctcacgttgacgcaggaaagacaacattaacggaaagtttattgtataccagtggtgcaattgcagaactagggagcgtagatgaaggcacaacaaggacagatacaatgaatttggagcgtcaaaggggaatcactatccagacagcagtgacatcttttcagtgggaggatgtaaaagtcaacattatagatacgccaggccatatggattttttggcggaagtataccgttctttatccgtattagacggagcagtattattagtttctgcaaaggatggcatacaggcacagacccgtatactgtttcatgcactacagataatgaagattccgacaatttttttcatcaataaaattgaccaagaggggattgatttgccaatggtatatcgggaaatgaaagcaaagctttcttcggaaattatagtgaagcaaaaggttgggcagcatccccatataaatgtaacggacaatgacgatatggaacagtgggatgcggtaattatgggaaacgatgaactattagagaaatatatgtcagggaaaccgtttaaaatgtcagaactggaacaggaagaaaacaggagattccaaaacggaacgttatttcccgtttatcacggaagcgctaaaaacaatctggggattcggcagcttatagaagtaattgccagtaaattttattcatcaacgcctgaaggtcaatctgaactatgcgggcaggtttttaagattgaatattcagagaaaaggcggcgttttgtttatgtgcgtatatatagcggaacattgcatttgagggatgttattagaatatctgaaaaagagaaaataaaaatcacagagatgtgtgttccgacaaacggtgaattatattcatccgatacagcctgctctggtgatattgtaattttaccaaatgatgttttgcagctaaacagtattttggggaacgaaatactgttgccgcagagaaaatttattgaaaatcctctccctatgctccaaacaacgattgcagtaaagaaatctgaacagcgggaaatattgcttggggcacttacagaaatttcagatggcgaccctcttttaaaatattatgtggatactacaacgcatgagattatactttcttttttggggaatgtgcagatggaagtcatttgtgccatccttgaggaaaaatatcatgtggaggcagaaataaaagagcctactgttatatatatggaaagaccgcttagaaaagcagaatataccatccacatagaagtcccgccaaatcctttctgggcttctgtcgggttgtccatagagccgctccctattggaagcggagtgcagtatgaaagcagagtttcacttggatatttaaatcaatcgttccaaaatgcggttatggagggggttctttatggctgcgagcaggggctgtatggatggaaagtgacagactgtaaaatctgttttgaatatggattgtattatagtcctgtaagtacccccgcagactttcggctgctttcccctatcgtattggagcaggctttaaaaaaagcagggacagaactattagagccatatctccactttgaaatttatgcaccgcaggaatatctctcacgggcgtatcatgatgctccaaggtattgtgcagatattgtaagtactcagataaagaatgacgaggtcattctgaaaggagaaatccctgctagatgtattcaagaatacaggaacgatttaacttatttcacaaatgggcagggagtctgcttgacagagttaaaaggataccagccagctattggtaaatttatttgccaaccccgccgcccgaatagccgtatagataaggttcggcatatgttccacaagttagcttaacagcttgcaaaagtcatataaaatgagatttgaaaggattagagactaattatgatgaaatgcgaatggatattgtgtcctgtttgtgggagcaaaacccgtaataaaattaggaaggacactgttttggagaattatcccctttattgtccaaaatgcagacaagaaagattgattaaagttgacaacttgaagataactgtcatcaaagagccagacgcttaagacgcagagccgatgaaattgtggaacaattcacgaatcatcggctctttttgtttcgtatttgaaagaacaaactcaccaaataaaaaaaacgatatgatatgataccctcaagtaggacacaaaaatataaaaacctacttgggggtattttatgtccagaaaaagtaaaattgatgcagtaaaaaaagtagaaatcgtagaacagtacctgaacggagaacttagccaaaaaggcgctgcaaaaatgtgcggtgtaaataagcggagtgttcaggattgaatcaggatctataaaacagacggaccagaaagtttactgtctcctaagacaaataaacgctactcaaaagaattgaaattgcaggcagttcatgcatacctttccggagagggatcgttagatgaaatatgtgtaaaattcggaatccgacagcattctcaactttcaagttggatcaaggcgtataatgaaggtaaggaattaaaagaacttaccggaggtagcgctatgaagaaagcaagaaaaacaacactggaggaacgaatctgcattgtaaaagactgtcttgaccatgaccggaattatggggcaatggccttgaagtatgattgttcctatcagcaggtccgaaattgggtggaacggtatgaaaaaatgggaagtgccggtttggaggatcggagaggccggcggatcggctctaagccaagccgcactccagaagaagaattacgggaccgtatcgcagagctggaacgtaaaaataaagacttacagatggagaatgacctgttaaaaaaagtaagggaattagaaaggagggatcgctttctttaatacataaattatgtgaatatcaggcaatcagggaactgtccaaatcaaaaggatatccggtcaaacaaatgtgcagataccttggaattactcgttcttcctattaccgatggctgaaacatcccaaaagtgacaatgagatcaggaatgaacagattgccgatattatcagggaaatacatcggctgcatccagatatgggttatcggcgtatccgtgatgaactggctgtaaattatgggattccggccaatgataagaggattctgagaatctgccggaaaatcggaatacagtcatctatcaaatggaagccgaagagctgtacgaaagcagacaggaatccctcccacattgcgaaaaactttcttcaccgggagtttcacgcagataaaccgaatgagaaatggctgacagatgtaacagagttcaaatattatataggggtagaagtacacaaaatatatttaagtgcgattcttgatctgtgcgaccgcaggattgtctcgtataaaatcagcgcgcataatgataatgcccttgttatggatacatttgatcaggcggtaacggcagagcctgatgcgcatccgctttttcattcggaccggggattccaatataccagtcaggcattttatagtcggctgaagaaacatcatatgaaacaaagtatgtccagagttgcacactgtattgacaatggaccaatggaaggattttggggaattttaaaacgggaaatgtattatgggaaacgctttacatcaaaagaagaattaatccaaggcatccaagactatattgaatactataacaaccgacgactacagcgtaagttacatataatgacaccgatggcctttcatgaacttacgttgaaagcagcataaaaataccgccagccggttaataggctgacggagaaaaatttattatttttcattgtcctcttgacgggtagcacaccaatattcgggtgggttattttgttataccctaaattaccctctgaatttgtttttaaatttggagggatttttttatgtccttttttcgggcagttatctatctgctcatacgaagcaaaatttatcaatacatagcatatcagagaacggcaggaaaccagttaaaaaaatttctgccagtgcaacggtacttctcaccttgaaagtagaagtacaatctccatacaatagaattactatttcctataaccgtaaaggtcacagagcctttgcggtttttcttttgtcgatttttgttggaaagtgccgtagggctgtttctgatatgcggtgtcgttctccgcctctccatctggattttttacatttcaaaaattcagatgggaggtatttatggtgaaatatgcaccaagaaaggtatatatcagagaaagtggcggctatgtggaattatcctacacggagttctgccgttgcagggaatccgaccagacctatatggacaagctgtttatccccattcaaggctgtctgcttgaagtcgtgagggagcaatacacagacttctaccgtgacaaggaacggtggcgttatctgcaaaaattagatacaaagaatagactgctatctctcgacggatttacggacagcgaggggaatcctctggactttatcactgatgaagcggtggacattgcagaaaccgttgtcaatgcggtcatggtggacaggctgaaagccgccctgcctttgctgtcggatagtgaacaggagctgatacaggcaatcttttttgacggactttccgagcgtgaagtcggggcgaggttgggcataacccagagcgttgtaaacaaacgcaaagccagaatcctaataaaactaagaaagataatagaaaattaaaatttaaggcgttcagcccccttgttttttcctttgggaagatgagggggcttttctctgccctctcaatcaattctgattggaggaagtaagaatggcatacaaccacggacgggaggacaggaaatggcgtatctggaaagaagcggaggaaaagctgctgcgtgagtgcggcgttgatgaagcgaccattgagcagatacgcatggcggacagggcagacttcaattccaacaggcggttttaccgatggacgaatgacgttgcggaatatcttgaggacatggcaggcagggagcggcaggcggaagtgggtacggttgcggagttactggaagagattgagagcgaaaatctctatcaagtattagtcacggtggacgggcgtaccttgaaaatcgtcctgctgaaaatgcaggggtattccacaaaggagattgccccgcttgtgcatttgacgactggtgccatctatgcgaggttagaccatctgcggaagaagctgcggaaaattttatagcttctaaaacagcctgccatcctgcgggctactgggtgagggatggaaatcccctcactcattttttgcaggaggacaacaggatggcatacagggttaaggcatacacgcttcgggaggaatccacggaaagcggcacaaggtattttatcagctttaaggacgggcagggcaaatcccacgagttggaagtgtcggaacagttctttatggagtttcggcagatggagcgcaggaacaggaatcttttctaatgggacgagcggcacagggagtttaacgaggtatgggacgaaaccctttacagacgggcgttgcgtgtgcctaagagccttgatgaacgcatggttgaggaagaacggaatgaaacgctctataaggcggttgggagccttccagagatacaaaggcggcgtttcctgctctactacgagtatgagttcaatttttaccaaatcgccgctatggagcattgcaccgcttcggcaatacagaaatctgttgcgattgcaaaggagaaagtaaaggcggaaattgaagaaatatctccaaccgtgaccgacaccgcccgaaaaagaaatctgttttttatttgtgtgggattggcggcattacatactctcacttttttccgtgggagtaaatctatttttaaggaggtcaacgcctatgtgcaacgaaaacaaagacaccgcccgaaaggaggaaagccatgcagaagttacagacagtcaacgccgaaacgctcctttatgaaccgcttgagaaaccatcctttgtggtggacagccttatcccgacaggcttatcgctgttctgcggctcacagaagataggcaaaagctggctcatgctgaagctatgcttatgcgtgtcgcagggaatccctttatgggatatgccgacaatggagggcgatgtgctttacctctgccttgaggacacgttctgccgcatacaggacaggttatttcgtttgacggacgaagcaagcgggcggctccactttgccgtggcaagctgcaagctgtcagacggtcttatcgtgcagcttgaagattatctgaaagattacccagacagcaggctcattgtcattgataccttgcagaaagtccgtacagcttcaaaagacaatgcctatgcaagcgactatggggacatctccctcatcaaagactttgccgacaggcactctctggcggtcattgtcgtacaccacatccgaaagcagaatgacagcgacgtgttcaacaaggtgtctgggacgacaggattaacggggagtgcggacgctacctttgttctggaaaaggagaaacgtgcgtctgacaccgccaagctgtatgtgacgggcagggacacgccttatcaggaatacacgctgcgtttccgtgattgccgttgggagcttgtggagcggaaaacgcaggagcagcttgcgaaagaaacgataccagatgtcctttttcggttggtggattttatgagggataaggaagaatggataggcacggcaacggaactgttagccgctatgggggaaacggaaaccatacccacggtgattacgaaatggctgaatgaataccgcaccacatttttaagcgagaaccgtatctgctaccagtacagccgcaggaaagacggcaggcggattgcccttgcaaggagggcgggtgacagcggtgatggtggtgacagcgatattaggatacccccctgttactgtcattgacgcttaaagccatgtaaagctggcggctctgccctgcgggtgacagcagtgacggtggtgacagtgattttaggataccctgccgctgtcatccctacgggagaacaccccgtaaacgcaaaatgcaggcgtgagatttactcgcccttttcggtcgtgtaaaaccacccctgcggtcagaaaaatcattccgatttttccgactgcgtttacagggtgtaacacactacactttgccctgcaaagtcgtgtgccagacgttccctctggactcccttaaggcagggctgtgccctgctatcctacgccttacggcttcggataaaagaatggcggcatgacggtgacggctcttgcgaggggggtatcccaaaaacaccgtcatcatcgacatgaccgtcatgcagggggtgagggtgacagttgcggcagtcggcagggggtatcccaaaactgctgtcaccaccgtcaccgctgtcaccccaaaggacggtcacccgccgaaagaaaggaggaatccgcctatgccttatgcaatcctgcgtttccagaaacgaaaagcgggcggcgttgcggcttgtgaacgccacaacgagcggaagaaagaagcctacaaaagcaacccagatatagatatggaacgctctaaaaacaattaccatctcatagcaccaccaaagtacacctacaagaaagagattaaccgcatggtagccgaagcggggtgcaggacaaggaaagacagcgtgatgatggtggaaacgctcatcacagcttcaccagaatttatgaaccagttaccgcccgaagaacaaaaagcgtatttccagacggctcttgacttcatttcggagcgtgttggaaagcagaatatcctctccgctgtcgtccatatggacgagagaacgccccatatgcacctctgctttgtgccgattacgccagacaataagctgtcagcgaaagctatcttaggcaaccagaaatcattatccgagtggcagaccgcctaccatgagcggatgtcctcacggtggaatcagcttgaacgggggcagtcctcaatggaaaccaagcggaaacacgtccccacatggctctataaattaggcggcaggcttgataaacagtatgaagaaatcgtgtctgccctatccgacatcaacgcctttaacgcagggaagaaaagggataaagcgttagatttactctctgcatggctgccagacgtggagaaattctctaaggaaatcgggaaacagcaggcgtatatcgacagtttgaaagagagaattgggcaggaatcagactatgcggggcgtatgcgtgatgaaaagtacgagcaggaactaaaggtgcagaaagcgaatcagaagatatttgaattgcagagaaccaacgagcagatggggcggctgctgtcaaaaataccgcccgaagtgttggaagaattgcagaaaaatcatagaagcagagcgaaagaaaggtagatatgtgaatgaagaaacaggattttaaggtgttaaagaccaaagacttgtacccgttccccgacaatccgtttcatgtggcagaagatgaaacactgtcagagttagcggaaagcatcaaggaatttggcattgtcacgccgataatcacacgcccgaaagatttggaacagcggcaggggcgtattgaacgacagggaaatatgttcacagaggtggaggtttaccgttatgtaacggagcagacctttgatgcttacctctatcagttggtggaaagcaagcagaaatttatcagccagatcatgacgagcaaaagccctgtccgttccgcagaagatgtggatgaagttgccctttcctttgcggaggttaaaatgcttgccacaggggacgagcgtttcaaagaaaagatggacttggatatgcaggtgtcgaagctcaaggtgttaaaacagagttatcttagtcagcattacgagcttgaggacagagttttgcagcactttccgaaagaaatcaaagagcttgaacagcttatttctgcctatgggtgtgatgttcccctgcttgaacagcataaaccaaagggcgaggatcggttttgcccaatgactttgcagggtgtgacttacacagaaaaagccgatgcaggcaagatgcttcttgccatctgtaaggaatatccgctgacacagccaaaagaaatcggcagctatcgagggtttcagatggagatttactatgatacggtcaatacccattattgcctgaacttgtgcggcaagacaaaacacaaggtcaatttgggcgaggacgctttgggaaatctgacccgaatagaaaatgagcttgccagaatccccgataagttggaagcggcaaagaccagacggacggaaattttatcacagattgaaaatgcaaaggaagaactggcgaagccttttgattttgaggacgagctgaaagagaaaacggaaaggctcaatgccttgaatattgagctgaatctggatcagaaagaccctgcggtacttgacgcagagccagaggaaacgaatgaactacccgaaagaaaagcggctgaccgtgagcgataatcgtcttttgcacatttgaaaagccgttatttgggcggtataatgggaaaagattgaataatcggaggtggaaaaatgtctttggaatttcagtttgaaacatttgtagatgtgtaccacagcatcttttccgaatatctaagctctgttatcgccaagctgccgaaagaaaatgagaagtaccgtgccatgaaagaggaactctcaagcctgtatgacaaatatccgaaaatcttggacatctttgatatggataaggcagaggggctttctgctgaagaatgtgcagggcttgtgaaagtcttacagcttcggaacgagcttaccgatatggaactgcaatcagtttattttcggggctgctatgatggtgtggggtatctgaaaaaagcaggaattttgtaatgaaatgattgagaaaaggcggcgttggtgtgaagctgatgccgcttttttacatagttgataggtagaaaaagttacataaatgtgctattattaaaaaggatttggaattaggattagaggggtgataaaatgaaattttctttaccaagtaatcgaaatgagaattttgaatatgatggtattttatattttgcacaaagattggaagaaatgttgtttgattattccatagatttatatcggatgcccttgttaaatacgcatcaattgctttacgaatattgcagtgtttatgctaaggtggaatttgagggagtaaaagaatatcaacggaatattgtttttgatgaattattagaatcattaaaaaaagatattgttttaaaagaatgttggggatatgaaaatatagaaaaagttattaaaacatttggttcaagctctccgaaagaaaagtataatacaatttcttatcttggggcaacatttggtaatgggagatattatgactggtgtgcgaggacaattataaagtacacaaatcaagggaagcaaaagaagaagctggaagcggcgataagatgttttgttcctgaattaatatcaatgggatatgatgcacactatgtatatagtgaattaagaaagagtttctttcagaatacggtcatagataaaaatagtgttcgtaattttttgaatatttttaattttgaagtacataaatattccgtatatttttctgtatcagctgtggctttaaaatttaaagatattctccaaaaaagactaaggctaaactttgaagatgatggaacttttaaattatttaaaaaggatagtaataaaatcatagtctattttgagaatataaaagctccatgtccaaatactgctgcgaaaattgcttataatagattggatttgttttttagtttttataagtttgttggggataaaagaagtttttccatacaaaagaaagctatggtaatggataatgatgtgaagattcctgtttttgttgatgcccaaagaacaagctataatattagcgaggggattgattttaaaacaattggaactacctcggatagattgttgacaggtttattaagtaatgccgagtctgaatattctcttttaagtaaatcaattgaattgcacaatacagctttatcaattcccgatttaaaaagtggatttttaaatctttggtcagcagtagaggttttatgtcaagataaaaacgcaacgagtaaacttgatgcagttttaaaaattgttgttcccattttaaaaaaggactatttgacttctatcgtaaatgatatagatgaatgtttgcagaacaatatttctgaacaggattataaaagtttcatggagcggattaatgaaacaggatgcgaaaaaaagaaatgtttttatttacttttgaagcccgaatatcaagatttgcgaaaagaaatcgttgctaaattagaaaattatcctgtattaagaagccgtattttaatgtttgaagatatgaaaacgacaaaaaatttaaaagagtttgttgatagatatgttcaaagagttacatggcatttatatcgtatgtatcgaacaagaaatgcgattgttcattcaggtgatgtaccacgtaatttgaaatatttaggagaacatttgcattcatatgttgatgcaacagttaaagaatttattgttaagttatcaggaagtataccttttgaatcggtagaggatgttattgtggatataagatttgctattgataatttagacaatgccatagggaagaacacaaatattgatgataaaatcataaatattttaattcatccagaaataggaagcgtaatgcattgtgaacaacatcttgaagaaatggatgagaacgaatagtatttttacatagccgagaggtttatcaaacgataatcccctcggcttattttattttcaaggaggtgcaaaagtgaattatcaggagtacaagcaatccctgaaccaaaggctgaccgacaaggtacagcgtgagctttcggtttttcgggaggaaatgttaggaaaaccgccgcaggaaatctacgatgcagcatatcagattgcattgaagaatgatattgccgagtgtttttcggaaacagattattccccacaggcggcgaaagctctcttaaaatcgcccaatctgttgcaggaggtttatgatgagtggttagaaaccgattatacccatatggaagatttacgccagaccatcacagaatttaaagactatatggttaagacagaaaaaatactgtcttggggagagaggtaataaagaaatgagaagtaacaagccttatgttcctcttgatcctgcggtcattgagcaggcaagacagattgaccttttaacttatcttagggactgtgaaccgagcaatcttgtaaaagtgaaaggcacaacaaatgtgtattgtactgccgaacacgacagtctaaagatttctaacgggaaatggtattggtggtcgaggggctttggcggagtatctgcccttgattatctgatgaaagtcagaggttttggctttgtggagagcattgaaattttgacaggcagggagttttcgtatgtgccgccgccccctgttccaaaggaacagaaagaaaaagtgctgcttttacccgacagatattccaacaatgagcaggtcattcactatctgtttgggcgtggaattgacttgcagatcattcaggagtgtattgatgagggtattctgtttgaaagtgcagggcgataccacaatgctgtttttgtcggtaaggatgaaaagggcgtagccagatatgctgcctaccgaggtcttggcggtaacttccgtctggatgcttcgggaagtgacaagcggtattccttccgacttctggcagataagcctgcaagttcggtgcatttgtttgaagccgccattgatttactgtcctatgccacttatctgaaatgtgagggaaaggactacaaaggagaaaatctgctttctttgtcgggggtatatcagccaaagaaagagctgaaagatagcaccatccccattgccctatccacatttttaaaagcaaacccacaaattaaaacgctctatctgcatttagacaatgacaatacaggcagacggtgtagtgccgccttaaaagtattgttgcaaaaagactatgagatcgttgacgcaccgccgcctgtcggtaaggatgtcaacgattttttgttgtcctatctgggtatcggacagcagaaaacccatcgtgaaaggggggatgcccgttgattgtcggatgagtattaccagaaagatactaaaacaaatcaagaatttaagaatgaaagcgaggaattatccaatgaaaaaatatgcagttactcttacaggacactatgaaaagaccatttctgtttatgcagatactaccgaacaggcggcggagaaagtcaaaatcattctctttgacaccgaccttatttctttttccgaggaagattttgtctgcggagaagccaagattgaggacgcaaataaggaagatggaaaggaaaaagatacgcccgatgaagatgaggacgagtgtatgaaccacgaggattgttcgggatgtccgtatctttgcccagcgtgtggagaatgtctgtgtgagtacgaggactaagacaggtcttaccaagcactgaatttgattatccatcttacgacggatactaaattcgcttgttaggggctgtcccctaatacccccaatatcaaagaaaggaatttttaagaatgagtgagtgtatctcttttatcatcggcacaatggtcggcggtctgacaggtgttgtgctgatgtgctgtttgcagataggaaggctctccgacagaaagggtgtgaccgatgcgtaaacgaaatgtgcagatactctttcggctgacggaggaggaagccgatgagcttaacgagcttgtgcgaaagtcggggcgttccaaagaagcgtttttaagggcgatggtgaaaggctaccgtctgtgtgaaaagcctgccccagagttttaccagatgatgcgtgagctgtctgccattggtaaccgtatcaatcagcttgcggcaaaagccaatgccttgaactttgtggacgcaccgatgcttacggaagaagcagttaagtggcggcagttccagatggatattcgcaagaagtatctgcttccaaaaaggaatcgggataatggctgtctgtgagatatgggatgtgaaaggcaggcttgaccatcctatcgactacgccaaaaacccagaaaagaccgtcaatcccaaatacacggaagcagacttgcaggcattaggtgatgtgatgaagtacgctaccaacggagaaaaaacggagaagcagttttttgtcacaggcgtcaactgtgagcctgccaccgcaagggacgaaatgatgataacgaaagggcaatggcaggatgagagtgagattgtctgctatcacggctaccagagcttcaagcagggcgaggtcacgccagagcaggctcatgaggtcggggtgaaacttgccgagcgtatgtggggcgacagatttcaagtgattgtcgccactcatttgaatacggattgtctgcataaccattttgtgttaaattccgtatcctttgcggacgggaagcattatcacgataataagaaaaacctgcgtctgctccgcaagcggtcggatgagctgtgtcgtgagtatgccctgtccgtgattgaacagccaagcggcaggaagaagccttacgctctttatcaggcggaaaagcagggacttcctaccagagatacggtggcaaggcaggcggtggacgaagccatcagcaagtcgtttacgctgaaagactttgaccgtgagctgttaaagatgggctaccgcattaactttgaccccaaccgtaagtattggacaatcattgggaaaggatggcaaagaccaaaacggcttcacaagctgggcgaggattataccaatgaccgcattatggagcgtattaaggaaaattcctatgccgtcagattttcacagtttgccaagtccacaaatgaggttaaggttttccgtgtccgagggacaatgaaaaatgcccgaaagataggaggactgtgggggctgtatcttcattactgttataagctcggcatcctgccaaaaggcagaaaacaagattatgcgaagctccattatcttttgaaggacgaccttatgaagatggagatgatcgcaaaggaaacaaggctgctttgccgctgtcatattgacaccgcagagcagcttttgtcatatcaggcttctctgacaacggagatggcagagctgaccgcaaagcgtaaggggctttattccctctcccgcaaagcaagcggcgaagaaaaagaggcggtcaaggctcagatttccgagatcacagggcggcttaacacgatacgaaaggaggtcaaactgtgtgagggcatcgaagtccgaagcggtgtcttaaaagaaaagttgcagaccattcggacagaagaacaggaaaccaaacgaaaggagctgatgaaaaatgaacacaggcggcgaagcggcagaacagatcgtccgaatgagcttggagggctttgaggtcgctgccaaaatcacaggggcaggggcgaagaatatcgccattctgctctataccattctcaaagaagaaaagaaaacgaaaggaaagtcaaggcttaccaatatgctccgttctggcaaggaactgaaagtctttacggtcaggcgtggcgacctgaaaaaatttacgcaggaagccaaacggtacggagttctttactgtgtattggctgaccgaaaaaataaagaccccaatgcggttgtggatgtgatcgccagagcagaggacgcatcgaagatcagccgaattgtggaacgcttcagcttggcatctgtggataccgctaccatcgtacaagaagcggaaaggacaaaagacggtaagtcagcaaagacagggcagccagagccagacatcggagtacaggaaaaagcacagaaggatcaattattagatgccctaatggggaagcctgtccagaaagaggacaatgccccaaacccctcggtggcaaagacagaaaagtcccctctgtccgagcctaccttagagaagcaaagcaagtccgcagagggggctactttgaatagggagaaaccatccgtcaaggaagaactgcggaaaatcaaagagagccgtaaggaacaggaaacagaagtttctcagactctcaatcaggaaaaatcttccaatcaggcaaagcagcctgtgaaaaagacagagcataagcagcctgccagacggaagaaaccgaaaaaatcgaaaggagcaagataatgagtatttacgatgtatttggcggcagtaagccgtttaataaggaggaatgggcagcacaaaaacaggcacagcgtaaggaagcctatgagctgattgacaatacctgtgccgagatgctttcagatggcgatgcctttcagcagtaccttgaggtacaggggcgttttgaccgttactctgtcaacaatgcgattttagtatctgcccagatgcctgaagcgacttctttgaaggataaaaatgcttggaagcagagccgtgtctatgtaaacaaggacgcccagaaggtcatcattcttgagccagggaaagaatacacccgtgaggacgggacaaaggcagtcggttacaatgcaaaagaagtttatgatatttccgatacttccgcagcaaaccgacagccgccgcaggaaaagaagggaatgcgtgagcttgtatcagcaatgattgacgcaagccctgttggttttcagcctgtggacgatctggaactgcctgccttttatgacagcggacagcagaccatttttattaagacagggcttaatgaggaacagctctttgtgagtatggcaaaggaagtgtcggcggcagtctttgattttaagtataacgagagccgagatgcgtctgattttaaatcgttctgcgttgcctatatggtcagctcccgttacggtgtggatacaagggcgttccgtttcgataagctccccaaagagtatgagggaatggacgcacaggcactcaaaggcgagcttggttctatgcgtgatgttctgggagaaattcaaagcgagatgtataagagccttgagaagaataaacctgcaaaaagcaaagagcaggaacgctaagacgaggtgctgcttatgaaagaagaacgctaccatctggcattggacgcttatgataaaaatattgtcatccgtgctttaaacaccttgcggacacagcagttacaggaggaacgccccaccgaccctgtggatgaactgattatcaaggtgtccgaagctccgagcagaaaggtcagggtgctgccctgcaagtgccgtgaggaacgataacgatcagaaaacgagcctgatccttgccggctgcggtatttttcccatcgtgtggtttgccctcttgaccgccccgtatgtagatggcggtctggtggaaattatcgaaaacctacccatagcaatgaacaatccgtttcacataacagtgtgtgaggacagcgtaaaaactgtccttctttttttgcttgcttacgggatggggatcggtatctatctttccacacgaaagaattaccgcaggcgtgaggaacacggttctgcaaaatggggcaacgcaagtgctatcaacaagaaatatcaagacaagaacccgtctgcgaataagctgctgacccagaatgtccgtatcggtctggatgggaaaaaacaccgccgaaacttgaacattctttgctgcggcggttctggggcgggaaaaacccgcttcttttgcaagcccaacgctatgcaatgcaacacatctatggtggttttagacccaaagggagaaatcgtccgagatgtgggagggttgcttgaaaagaaagggtatgaggtgcgtgtccttgaccttatcaatatgcacaagagccattgttataatccctttgtctatctgaagaacgataacgatgtgcaaaggcttgtgaccaatctttttaaggcaacgaccccgaaaggcagccagtcgcaagatccgttctgggatacggcggcaagtatgctgcttttgtctttggtattctatctcaaatacgaagcaccaaaggacgagcagaatttcccgatggttatggagctgcttcgtgcaggggaagtccacgaggatgatgacagttatatcagtcctcttgacgaattgtttgaccgtctggaaatggagaacccagaccatatcgctgtgaagtattacaaggattaccactctggcagtgccaagaccttaaagagcatccagatcacccttgccgcaaggcttgagaaattcaatcttgagagtgtggcggctttaaccgctaccgatgagcttgacctgccgtcattaggagagaaaaaggtggctctgtttgccctgatcctagacaacgatacgagttttaacttccttgtgtcgattttatacacccagatttttcaacagctcttttatcttgccgaccacaaatacggaggaagcctgcctgtgcattgccattttattatggacgaatttgccaatgtttcgctgccagatgatttcgacaagattttgagtgtgatgcggtcgagaggtgtgtcggtcagcattatcctgcaaaatctggcacagctcaaagccttatttgaaaagcaatgggaaagcattgtgggcaactgcgatgagtttttgtatctgggcggcaacgaacagagtacccataagtatgtgtcggagcttttaggaaaggaaaccattgatacgaacacctatgggaaaagctctggtcgcagcgggaattattccaccaattatcaaatatcggggcgtgaacttttgaccccagatgaagtgcgtatgcttgataaccgctacgcacttttgtttattcgtggggagcgtcctgtgatggacttgaaatatgacattttaaagcaccccaatttaaagctgacaacggacggaggaatgccgccctatctgcacggcgaaccgacacaggctgtcgcaacccttgtgtttgacagcgatattccaaagaacgctgtaacggtgcaggctgtcagcacatcttatgagcttctgtccgaggaggacttagaggaattattcaaaatttaaggaggaattactgtatgagattatttaagaagaatgacacccagaagaacaacacaaagctgccgatgacaggcagggtaaagaaaggcttccgcttttactgtatggtggtgatggcgatgaccgttgtgcttggcagctccgtgactgcctttgccgcaggcgatccattgaccgtagtcaataacctgtccgactttatcttcggtctggtaagggctgtcggaatgattatgcttggctttggtatcgtgcagatcggtttatctctgaaatctcacgacccctctcagagagcaaacggttttctgacccttgcaggcggcgttgtgattacctttgcaaaagagattttgacccttatcacaggttaagtttgatgtaaggaacaaagaaaagacaatgcctgcggtgctgcttcctttggaactgcaccgcaggaggaaaggagggtacaaaatagagaataaccagaaatacaatatcatttatgccgatccaccgtggcgataccaacagaaaaatttgttgggagctgcggaacatcattattccacaatgagtgtgaaagatatttgcgggctgaaggtagaggagattgcggcaaaggattgtgtcttgtttttatgggcgacttttccccagcttcctgaagctctgcgtgtgattaaggcgtggggctttcagtataaaacagtagcgtttgtctggctgaagcagaataaaagtggaaaaggttggtttttcggtctgggattttggacaaggggcaatgcggaaatctgtctgcttgctatcaaagggaaaccgcaccgaaattccaaccgtgtccatcagtttcttatcagtccaatccgaggacacagccagaagcccgaagaagcaagagagaaaatcgtagagcttatgggtgatttgccccgtgtggaattatttgcccgtgaaaagacagagggatgggatgcttggggaaacgaggtggaaagtgatattgagataagcagtgatacagaaaaagaatggaggtgatcgatgtgtctgataactgggtagttcagaatttagagaacgctctgaacacttggaatgaaaagttagcggagatatggcagattattacccaatccccagagcagttcaaaggcggcacgatatgggatgtgatcgtcggcatccacggtgcggtgcaggcgatcggacttgcccttttggtgctgttttttgtggtaggcgtaatgcgtacctgtggcaattttgcagaggtcaaacgccccgaacaggcattgaagctgtttatccgttttgcccttgcgaaaggtgcggtcacttatggtctggagctgatgatggctctttttaatatcgtacaaggtttgatttctactataatgaacaccgcaggttttggttcggcaaccgatacggtattgccgcaggaaattgtaacagcagttgaggactgtggctttttcgagagtattcccctttgggcagtcaccttgatcggcggtctgtttattacggtattgtcgttcattatgattatgtcggtgtacggcaggttttttaagctctatctttataccgccattgcacctgtgccgttatctgcctttgcaggagagccgagccagagtgtaggcaagagttttatcaagagctattctgcggtctgccttgagggagcgatcattgtgcttgcctgtattatcttttccctctttgccgcagcaccgcccgttgtcaatcctgatgcagcggcggttacgatggtatggagttatgtgggcgagctgatttttaatatgctcatcttagtcggtgcggtcaaaatggcagaccgagtagtgcgtgagatgatgggattgtaatgcaaaatttttctgtgcgtattgacttggttgtatgaaatgagtataatatggatagaatactactatctaatatacgagaaggaggttttgttatgaatattcgtccatccgcagcaatccgccagaattacaacgagattgccgatatgtgcagaaagaccgcagagccgattttccttaccaagaacggtgaaggagatttagtcgttatggatattgaaacttataaccgcagggaaaaaatgctgaagctgcgtgaggaactgcttgccgtagaggaagataggatgcgtggaagcaaaggctactctgttgatgaagtcgctgcgatgatgcgtagtgcaatcaaggaggcggcaggtcatggaacagcataataaataccatgtgattgtatcggaacgggcaacgcagatgcttgtttcccacgctgcttttctggcacaggtcagtccagaagcggcggaacggctgacagccgaatttgaaaaggctgcaaattcattagaactgatgccgcagagatgtccgtggctcacaggggaatatatcccaagaaatgcctatcgttttatcctgtttgagaaacgctatatgatcatattccagatagtagacgatatagtctacgctgattatgtggtggattgtaggcaggattacagttggctcattcgataacaataaaataactttcagaaatcgtcacttacagttgggtggcgatttttttatgtctgaaagtatcaacaagaaaggatgatagaaatgaagaaagaagaaaaatattaccagatttatcgtatccatttactgaacggagaagtgattgaagcatcagaagaatacgacttgcctgttgaaaaaggactggtgggaaaattccaaaaggcagacgacaacaaaatatttgaaataggagatgctgtttctggattgctttatgttccaaaacgcagcatcctttttatagcgacaggagaggtcaagaagggatggtgctaatatggaggtcaagataaataaggagatccgtaattatacggagagtatgttttttggactgtcgatgcggcagttcattttttctgtccttgcctgcggtgtggcggtggctttgtattttcttctccgtccctactttggcacggaaacattaagctggatgtgtattttaggagcttcgccttttgcagcgttgggttttatcaagtacaaagggatgacagcggagcagttcggctgggcgtggataaaatcagagtttatcatgccgaaaaagctgttgttttccccagataatctttactatgaagccttaaaagaaacgattgacatccacgaaaaagaagctctgggtatccgtatccgcagaaagcaaaagagcagacagagaaagaaatctcaaaagagcaaggaggtatcgtatgattaagacactgaaaaatctgtttaagcaggataaggaaaaatttgtcgtacccaaatcggtgcaatcggtaatcccgattaagacgatctgggaggatggcgttttccttgtgggaaagaacaagtatgcaaagacatttaagtttgaggatattaactatgcggtggcaagccgtgaggacaaggaagcgatgttccttgaatattctgaacttctaaatgcccttgacagcggtgcgactacgaagattaccattaacaacaggcgtcttaacaaggcagactttgagcagacaatcttaatctcaatggtagacgatggactggataagtaccgtaaggaatataacaaaatgctgcttgataaggcaacaggtgcaaatgccattgtgcaggataagtatgtgacggtatctgtctgcaaaaagaatattgaagaagcccgaaattattttgcccgtgtgggtgctgacctgatcgggcattttaaccgtcttggctcaaagtgtgtggaacttgacgcaggagaaaaactccgtatttttcacgatttttaccgtacaggagaggaaacaggttttgcctttgatatgcttttgagtatgcgaaaaggtcacgattttaaggactatatctgccctgatactttcgagtttgaaaaggactacttccatattggcgacagatatgggcgtgttatttttcttcgtgagtatgcggcatatattaaagacagtatggtggcagagctttgtgagctgaacagaaatatgatgttgtccgtggatgttgtccctgttcctacggatgaagcggtgagagaggtggaaaacaggcttttaggtgtggaaaccaacatcacaaactggcagagaaagcaaaaccagaacaacaacttttccgcagttattccctacgaccttgaacagcagcgaaaggaaagtaaggaatttctggacgatttgacgacccgtgaccagaggatgatgtttgctgttttgacaatggtgcatacggcagaaacgaaagagcagcttgataatgatacggaagcactccttaccacagccagaaagcacctgtgccagtttgcgatactgaaatatcagcagatggatggattgaataccgccctgccctttggtgtccgtaagattgacgccctgcgtacccttaccacagagagccttgcggtatttatccctttccgtgtgcaggaaatctatcacgagaacggtgtgtattacgggcagaatgtgatcagcaaaaatatgatcattgcaaaccgccgccacctgttaaacggaaactcctttattttgggcgtatctggtgcagggaaatcgttcacggcgaaggaagaaatgactaatatcattctcacagaccctaatgcggatgtcatcattatcgacccagagcgagaatattcccctcttgtaaaagcaatgcagggagaagtcattcacatctctgccacaagtgaaagtcacatcaacgctatggatatgaactctgattatggtgacggtgcaaaccctgtcattctgaaatcagagtttattttatccctgtgcgagcagcttatcggcggcaacagtcttggtgcaaagcagaagtccatcattgaccgctgtacggcaagtgtgtaccgctattatcagcagggcaactatatgggaacaccgccgactttgcaggacttccgtgaggaattgttaaagcagaatgagccagaagcacaggagattgcccttgccattgagctgtttacggacggttctttgaatacctttgccaagcataccaatgtggatacaaagagccgacttatctgttatgacatccttgatttaggaaagcagttgcagccgatcggtatgcttgtagtccttgacagtatcttaaaccgtattacccagaacagagcgaaaggaagaaatacctttatcttcattgacgagatttacctgctgttccaacacgaatatagtgccaacttcctttttaccctctggaagcgtgtgcgtaagtacggtgcttactgtacaggtattacccagaatgtggacgacctgttacagagccatacggcaaggacaatgcttgcaaactccgagtttatcattatgcttaatcaggcatccaccgacagacttgagcttgccaaactcctgaatatttccgaccttcagatgagctatatcacgaatgtcggggcaggacagggacttttaaaggtaggcagctcccttgtaccgtttgtcaataagttcccaagaaatacagagctttacaggctgatgacaaccaagtttggagaggtttaatcggatgggtgacggagaacttttacaggcacaggtggaaagaaagggattgtgtaatcaaatttatcataccgattgtatggagttgttggcacaaattcccgataactatgtatcactcattttaactgatccgccttatggtatctcttaccgaaatcattttgcaaggcagccccacgctgttttaactggagatacggggatagattatgaacggtttgcgagggaaagctaccgcattttgcgtgagaactcccacgcttatttttttacccgttttgactgctatccctatcattatgactgtttgaaacgggcaggctttacggtaaagaattgtctgatcgtggaaaaaggtacgattggagggattggcgacttaacaggcagctatgccaataatgcagagtggattattttctgccagaaaggacggcgaacttttcagcatacaacacttcttgagaacaggaaaaaagaagggatgcagtaccatgcaggcagagaacgaagtaaaaaatataagacacgctttaatgcctgttggtttggcgaagaatatccgaaagcgacctataattctgtatggcagaaacagcatcagatttatcatccaacgattaaaaatgtagagtgcttatcgtggttgatacagatttccagtttgcagggcgagttggtttttgatgggtttatgggaacaggcagtacagcattagcagcaatacaaactcagagagcctatctgggggcggagattgataaggcgtattttgaaattgcacaaaaccgaattaaggaggtagaaaagaggaatgtcacaaattatttttaaatcgaaagagcatcgtgatttctttctggaaatgatgtcaaagtgtaaagtcaatgactgttatcacagggcatttttctatgtaatgggcattgcaggagaaacaagggcaaatatcaatcagatgtttgattttaagcaagactgtattgaaccagaagggatgtatggaggatggcagacaagtggaacggtcaaggtctgccaccttgcctttaatctttggaacaactatgtagaggaaggtcgggaaacgagctttactccagaagatttattttgctgtgagttcgccccgtattttatggagggcattaaggttcgatacccagaatattgcagggaacttcatacgccccaaaagcagaacgaccatacacgctaaaggaaacaccctgcgggtgtaccacgatgcccagaaaacagggcaggaataaagaaaggaatagcctatgaaagattatctgaggaaatataagaaacagatttgtttgactgccgccgtgtgcctgcttggtacggcggctttttgcggttttcatatctatcgtcattatgcacaggtggaggaacagacagaagcctttgaacagattgccgaagtggtggaagaagcacccgaaagtgagcctgcttctggggatacgcctgtcagcgagggcgaggatgttcttgcaaagtatagagaactgtatttgcagaatgaagatatggtgggatggatcgctattgatggaacaaagctcaattatcctgtaatgcagacaaagaacaatccgaacttttatctcaagaaaaattttgaaaaagaatacagcgatttgggtgtaccgtatattcaggaaaattgtgacatcttaaatagcgataacctgatcatttacggacatcacatcaaaggcggcaagatgtttggtgcgttggaaagctataagtccaagagcttttatgaaaagcataagaccattcagtttgatacgctgaccgagcaggcagaatatgaaatcgtggcggtatttaagactgtggcatatcgtgcagaggggtatcgctattatgattttgtaaatgcggaaacagaagaagcttttgcggaatatgttgccaagtgtaaggaacttgctctttatgatacgggagtaagtgctgagtatggagataagctcattaccctttcgacttgtgaatattctgctcaaaatggcaggcttgtggttgtggcaaaaaaggttgtttaatgtgaccgcaaaatctcaaaggatgtgctgtattcttggaagggaggttttgtatggcgaagattaaaaccagagatgcggtcaaaggaacaatcaagaccattgataaggctactgttgcttcggagcgtatgaaatctgcttataccaagacaaaggataaagcagagcagagctgctatgcggaggaaaactctgccacagaatatgccgctgataaagtgtcccacaccgctgagcgtgtgactatcgagggtgtctatcaatttgataagcagggacagaaaagcgttcgcaccacgaaagagaacattgttaaggcgaaggacaaggcttttgagttcaagcaaaaaaggatgatgaaaacagtccaaagccaaagggcgaatgctgcaggtcagaacggttcacaattccattatggaatggtgagccgttcttctgcgtctaatacctctgttcagcgtgtgaaaggggcaagacagacacaaaagaccataaagcaatctgcccgaaacagtaaaaatacaattaaaaccgctgcaaaaggaaccgtcaagacgacacagaaatccgttaagacggcacaggcaacctcaaaagctgccattaaaacaacacagactaccgctaaatctgcacaggcagcggcaaaggcatctgccaagactgcccagaaagcggcacaggcggcacgagccacggcgaaagcgtccgctactgcggtcaaaacgacagcaaaagctactgtgtcagcagtaaaagcgattatagcgggtacaaaagcattgattgccgccattgtcgcaggcggttgggttgcagtgatcattattttgattgttgtattgcttggctgtgctgtgtcgctctttggcggcggaggtaacagcaacgcttatactcccgtaagtgcggaagtggaagcctatgatccattgatacgccagtatgccagtcaacatggcattcccgaatatgtggagcttatcaaggcagttatgatgcaggaatcgggcggtcgtggaaatgacccgatgcaggcttcggagtgtggatataacacgaggtatcccaacaccccgaatggaattaccgatccagagtattcgattgatgtgggtattcaaaatcttgcagactgcttaacagcggcagaggtggaaaaccccgtagatatggagcatattaaacttgctttgcagggctacaattttggaaatggctatatatcttgggcgaaaaataactatggaggatattcctatgcaaatgccgtagaattttccgcaatacaggcagaacgcttggggtgggacagctatggcgatacgcagtatgtcgctcatgtgcttcgttactatccatacggacgggcatttacaagcggcggtaatcaggcgattgtagaggttgctttaacgcagcttggtaatgtgggcggtgagccttactggtcgtggtacggttttggcagccgtgtggaatggtgtgcctgctttgtatcttggtgtgccgaacaatgcggctatctggaaagcggaattataccgaaatattccctttgttcggatggtgtgaattggtttcggaacaatggacaatggcaaggtcgggattatgagccgacagcaggaaatctcatcttctttgactgggagggagatgggacaatcgaccacacagggatcgtggagaaaagcgaaaatggtacagtttataccgttgagggtaactctggggatgaatgtaagcagagaagttatcctgtcggaagcagcgtaatctacggttatggtatccctgcgtattaaaaaattgctcatccatagcaatgtggatgggcattctacataaacaaatcattgggtgaatattgacttcattatttagattttggtataatataacggtttatatagtgctgaaaaagcctattcagactgaaggaatttagcaacaagagggtgaagaagtgtttaacatagcaatttgtgatgatgaagaaacactcattgatgagttgaaagaaaatcttataaagtatgccgctgaaacgaataaagagttttgcttttttatctatcacgacggcagcgagttattgcaggaatacaggtcagattatgacctgatttttatggatataaagatggaaaagctaaacggcttaaagacagcggaggaaattcgtaagatggacagcatcgttgggcttattttcttaacctctttgaagaaatatgtatggagaggttatgagtacggtgcagtcaattatctcttaaagcctgtaaaatatagcgtcttaaaaatggaacttgaccgctattttgcccactatcaaggaaaagatgagccgtatatgagctttcagaacgataacggaaagtataaggtgctgtataaaaatctctgttatgcagaaactgaaaagagaaatgttatgcttcattttgagggacaacagcagagaatttataaaaatatgaaagaggtatcttcgctgctcttaggacagccgcagttcgcctgtccgcaccagagctttgtagtcaatatggcttatgtgaaaagtgtggagagcttggaacttgtgatgaccacaggagagcatattccaatcagtcagccaaagcgtaaggaatttatgatgaagttgacggacttctggggggatatgctatgaaacaggttatattctatttttttcttgatactttggctactatggcagaagtttatatgctatatacatgtaatactattttttgcaaaaagtgtcagatgaaagtgcttggttttatcccctatctagtgatattctttcttacttgtgttatgacatgggtaatcccattggggacagttaaaatcattacactttttgtgacctttctctttttgcaacgacttatcctaaaagaaaaaaggtataagttgattatggcatattcgctctattttatgctaatgtttttgaatgattattctgctttaatagtagcggatgtaatatttggttacacaagtattatggcaggaaatatcgttgtaaatatatggcaacagtatctgatgaaaattattatactttgtttcatcatcgcttttttaagtaaagtatttagaaagtttgtctatgagttgcaaccaagagatgctgctctgtttctgttatataatattattacttatttcattatatattacagcatgggtcatggctatttttcaggtaatgtcaactggtttaactcaatgattggactcagcgggctattgcttggttgtctgtttcttctactttttctatatcagaaaaatagcacttatttaaggtgccaaaaggatattgcacagcaagaaatacgagagcttgaattaaaatatgagtattataaagaaaaacagaaggatgaggagaaggtacgctctgtttaccacgacatgaaaaaccatttgcttgttttacaaaagcaaatcaattctcccgaaacggcagaaatggttgaaaaactgcaatcacaggtggcaatgtatgaggactatgagcatacgggaaatgacattcttgacatcattttgaaagaaaaatcggaaacagcaagagaaaggaatatcgcattatctgttatcgtcaatcttaatgatgtggactttatcgaatctttggatataagtactattttcggaaacggattggataacgccattgaagcaagcgaaaaacttcctgaagaacagagggcaatacttgtgaaagcggggaaaatgcaaaacttcttttcggtgcggattgaaaataactgcttgcagaatagcagaaatacaaagaaccgcaccacaaaagcagatgatttcttacacggtttcgggatctccaatatgcgaaaagccgttgagaaatatgatggtcaactgacgatcaaatgcgaaaatgggagatttacattaaaaattttaataccaattccataaagaatgaggcttatgagcctgttgtctatcacggacagcaggctttttttatattagaatttgcgttctgaatattagaatttgcgtcttgtcttgtattctttatttaataggatatgatgagcgtatcaagtggtacaaatcaaggaggaattactatgtcaatattaaacgcaacccatttgaaaaaatactatggtaaggacgagagccttgtcaaagctctggatgatgtaaatgtatccgtagaaaatggtcaatttgttgccattattggtacatcgggcagtggtaaatctactttgctcaatatgcttggcggattagacattcctacagaaggcagtgtgaaggtagaaaataaaaatcttgaaaaactaaccgaggaacagcttactgtgttccgccgtcagcgtatcggctttatttttcagaactataatttaatctcttatcttacagcgtatgagaatattgtacttcctgtccgtttggatggaaaaactgaggataagaaatttttgaaagagattgtgcatttcttggaacttgatgggaagctttctaactatccgagccatctttcgggcggacagcagcagagagtggcgattgctcgtgctttaatatcaaagcctgcaatcattttagctgacgaaccgacaggaaatctcgacagtcgcacaagtgataaggttattgatcttctgaaaatgacgagtgaaaagttcaatcaaacgattgtaatgattacccacaatcctgaaattgctgaaaaggcagatgtgagaatacacattgaagatggaaaaatagtaaaataagggaggtactcggaatgaacaataaaaagataacggcaaaaatgatttctcggatgtctaagcagagccttaaatcaagtcgtatgcgtaacatctttgtgatgattaccattgttttggcatcagctctcttgaccgctatccttatgtttgcaatggggcaaaatcagcagatcaaaaatgacctctcccacagacaacaggtagattattataatcttaccaatgaacaggtagaaactctgaaagcagataaccgtattgcttatcagatacagatgaaaacgggtgttctttccccaatggacggctttgatgtaatgccatattatgtgagcgagttgtcagataaaattcaaataggtgaactgcttgagggaaaacttcccgaaaagaaaaacgaaattgctgtacaggcagagatgctgaaaaagatggatatagaaccaagagttggtagtaaggtgacctttactttttatgacggcaatattgaaacctttacagtagtaggtatcttaaatggtagcgatacggcaaaacagttttctgtattcttatcgcagatttatgcagaaagcggcagtcagttgagcgatatgccgtatgaggtttacgcaaagttgtatggtgcaacaaaaatgcagcctgaagattgtaaagaagtcatgtatttaattggaaaagaagcagggattgagagaaaatatgttaatccatccatacagtttattcaatcactctccgtggatatgcagacgattattctttgtggtatagtgggggcagttattttacttgcttgtgttcttgtaatctacggtgttttttacttgtctgttatcggcagaatacatcagtttgggcaactacgcacgattggaatgacaaagaagcaaatgaaaaagtttgtttcccgtgagggaggtgtactatatcttcactctgctcctatcggtattttgattggcggaattgtcggatatttcattattcctgacggttttaacatcttgaatactcttttgattatcttttttgtatttgtggttgtctatgtcattacgatggtttcagtatgtaaacctgcccgaattgcagcgtctgtttcgccgatggaagcactccgctatgtaccgcaggatggtatgaaaaagactgcaaataaaaagctttgccgcaaactttccccgatgggattggggatgatgaacttctctaaaaatagaaagaaaacggttattacaatgctttctcttgctctgggcggcattctttttatgaccgcagcaacttatatgtcatcctttgataaggagaattatgcaagacaagggtattttgtagacgcagagtttcatatcgaatatgcacaatccgctattgaattgaacgaaaatggtatgagtggtatgcaggcagagatgcctttagataataaaatggtaaaagaaatatcttctttagatggtgtggaaaaggttacagaaatcaagagttttggtgtacgctttgactatccgaaaaatgatgaatacgataacgatgatattatctatcctttgacagaggaagacacaagggaaattggtaaatatttggaagacggaagtgccgactatgataagcttatgagtggcgactatattcttgcagcaggtaacaacaatgcagcggagatttatggatgggagtttgcagtgggtgacaccatcatactccattattatgacggaaacaaaatgtcagaaaagaaagtcacgatacttggtattttgaatcataagtatgttcttgatcataatggacttcaaggatggtttttgatgcctgaacaggcgatcttaaattttctttcttatgacagtttaaacgctcatttgcttgtatcaactgaagcagagaaagaagaaacggtaggagaagcacttacagaaatgttagcagaaaagagtgaattaaatcttgaaacttttgctgacagaaaagtagcttatgagcaaactgcaaatcagttatttggagctatcagtggattggcaatatttattatgatgttcagtattttaagtatgatgaatacgctgattacaaacattgttacccgtaaacaggaacttgcaatgttagagtctattggaatgagtaaaggtcaaattcacaggatgctacttggagaaagtctgcttttggtactggctactgttggtgtgacaatgaccattggtacgctgtgtggttatgtattaagtaatatgctctataatgtgggagcattttatatggcatttaagttccctgtatttatgacattgatctattcagttgtacttgtttctgtacctttaattattacccttgtatcaatgcacagcttttcaaaagaagcacttgtagaaagattaagaggaatggaaaattgatatgcgaatatacgatacgcattacaggaaaacaagatattctggtgctttcgccacaaatcataggaacgctgagtgagaaaattcgatgttcagacacgaaagaattgataatccctgcggacgaattatttccacaggggtatgcggaatatctggagcgagtgatgcagatcaatgatattggaaaaaatgttggcaggcaggatgtatatgatttgactgcaaagcagattgggatgctgaaggtggaacagcagaaatgcttcgataaagcaaaagcagaaacaaccgataatgctgcacaatttaaccttgaaacaaccgaaaatttctttttgctgacaaaacaatccgacagccgttttatatgtgactatgagaatggagagaaaattttagtttcactgaaatatttacagacctaaaaaggagaaagccagagggtcattcctctggctctttcgccttgcatagacttctgacggttgcttcaataactgacaactctttatcgtcaagttcatcaagcagggcatcgacctgtctgcgtgtagaactttttaccgttttttcctctgggaaaaggaactggtcaagtgagatatgaaatcgtcgggcaaggaaaaataatagctgaatgcttggaaactgcccatcgttttcaatggactgtacatgacgcacggaatagtccaacagctctgctaaactttctcttgtcatatgttccgtattgcgggctttcttaatagcttgacctatcggtgtaaaatcgaagtccagattgcactttctatcgtccatttactcaccacctatcctctgatacttcatatttctatattgtacagagatgtggcttcttattaaagaaagtgagattgcttgaaacaggagataatatttcttgtttaaggagataaaaaagcctgatatgagatgaatttatgtaaaataaaatttctatcgttatgaatatattgaaaacgacatatgaaaaggagtataatttatgcaaaagattgaatgggtgagatgccctatctgtcaaaataaaacgagagtacaaatacgggaagataccgaactaaagaattttccgttatattgtccgaaatgtaaacaggaaaccttgattgaagccaaaaatttgcagataactattataaaagagccagacgcaaagacgcagagccaatgaatttgtgatgtatttcgcagatcgttggcttttttcttttccaaacaaatgtgtgagtgagttcttatattaaatcaaaaaagtgattatttaagtttggagggattttgtgtattggtctgacactaccatgacgctgcttgttttgagcagcagttatctacataatatttgacaggattgataataacctgttaaaaaaatactttctcttgtatggaaatattatgcactaaaaagagatgctaaatatctacataatagaattattatttcttataaccgtaaaggtctgacagcctttgcggtttttcttttgtcgttttttgttgaattaaggcgtaagcctgtttggggcgtagggtgtcgttctccgccgatcaatctgaaatttcaaaaattcagattgattggaggaacaaagaatgaacgaaaaacatcctaaccgaaaaaaggacaagcataacccttatacgctgatgattgtagagggcagatattacctctcttttaaagatgggcgggggataatgcaaaatattgaaatagataaagtgctgtatgacctgtttaaccgttttgagcttgaggacatttcctatcttaatcgagtgagcaggcacattgaacactccgagttgacagaaagctccttgaatgaccgagccttttataaggaagaaagtcttgaggaaaccgtttcaaggagtatggaatatgaacagttacataaggcaatttcaaaactgcctgaaacacaaaaacgtaggctgcttctgtatttttttggagagttgaactatgaacagattgcagagcttgagggatgtacaaaaagagctgtgaaattcagtattgacttggcgattgagaagttgaaaaaaagtttttgattttttcaattttagactacacttttagcttttgagtgagcaaacaggtgagagggattaaattccttccacctgttttgctttgtgtggcgaaaacgggagtgatccttgacaaacgaatatccattcgccaaatacttcctctttgtgattgtgatgagcataagcgtgtgcagcggtacgccaagacctgttaagaagcagcgagcgatgaaaggaggtgctcccattcattaccgactgaaaatatcggattgcttccgatttcgccataacccacaaagagaataatggtactcccgtccagtcacaagtccgagcgtgataaaaccgtcgcagacaatgagggcggctctggcagaccgtcagaggggtgaaactcccgtggtgtcagttcgctgctgaccgtttggcgacttccctgtgttctatgaacacattgcatttcggggtgtcgaggacaaattgagatgcttctatcataaagccagataaaaggtagtcataggaatagattttgctaatgatcttccaatattaaatacttccttttttctggctgttacataggtaagttctttcttacctaaaaccagataggaggtctgaatatttatggaaagaattattaagcgtggggatattttctacgcaacacttgatcccgtcattggatcagagcaaggtggtacaagacctgttcttactatttctaataatacggggaacaggtatagtccgacaattattgttgcaccgataacaagtcgtacacatacgaaagcaaaactaccgacacatacagaggtgaaagattttgataagcttgataaagactcaattattctgcttgaacagataaggacgattgataagcagagattaaaacagtatatagggctgatgcccgaccacataatggcaagagttgataaggctcttgccattagtcttgcaatgaacggaggtcaaaatgaaagaaattaagattgataagaatattgccgccttaaaacttattgagatacttcttgaaaaagggcaaataaatcaagcaacatatacaaatatcgtgaagcataccaattcgcacatttcacaagcggcttgaaagtaagtaaaatatagacaatacagaaatggaggtatgttttatgaatacagcagtcaatgaatataattaccgatttaagcttacagactatgcccaatttgatagaaatagagcaagaaatgttgcgatttatggtcgtgtatcaacagaacacgaagcacagttatctgcgttagaaaatcagttacaatggtatgatgaccaagtgaaatatcatccaaattggactatctgcgaacgctatattgatgagggtatcacaggaacgcaggcgaagaaacgccctgcatttctgaaaatgattgaagatgcaaaaagaggaaaatttgatctgattgttaccagagaggtttgtcgttttgcacgaaatgttgttgatacgcttgttgtgacaagagagttaaagggcattggagttgaggtgttttttattgacgataacatttggacaatggatggtgatggagaattgcgtttatctcttatggctacattggcacaggaagaaagccgcaagacttctgagcgtgtaaaagcaggacagaaaatcagtcgtgacaatggtgttctttatggaaacggaaatattttgggatatgatcgtatcggagatacttatgttgtcaatgaagaacaggcagaaaccgttagaatgatttatgacttgtatctgcaaggttatggttcaatgagaatagcaaagattttgacggaacgaaaaagaaaaacagcttcaggacttattaaatggagtgtttctaatataatgcggacgattaagaatgccacatatacaggaacaaaatgctataacaaatccagaagcaataactttttagaacaaaagcgtatcaataaccttgatatgtccacatacgaatatgtagaaggagattttcctgctattgtttctcaagaggtatgggacaaagcacagaagataagagaaagccgaataaaacccgcattagtaacagcggagaaaaccactcatagtagacgaagttcaagggatatatgggtaaataaacttcgttgttcctgtggctcatcatatcgtaaaaataagtggcatacaaagttagatggaaagacttcatacggttatcaatgttataatcaacttaataacggtattaagcgtaaacgagcagaaatcggattggatacggagggctactgtgacagcagaatgataacggactggaaacttgattttatggcaaaagctctgttagaacatttatggacagaaagaaaagaatctgttttgcttgcgttagatcttattaagtgttattataaggaagaaaataatatggaaagtaaatctgatgttgtatccatacagacacgaatagataaagcaaattgccgacttactaatttgattgcaatgagagctgacggagaaatttcaaaggacgagtatctgtctatgagaaagcctattgatacagaacttgcacaacttcagaaagcccttgaagatacgccatcagacaagaataatccaagaggtcttgatttgacaggtattcagtctacactaaacagtcttattgattttagcggaagtacaatcagtcacgatgttatcgaccaatttgtttatatgataacaccaacctctgatactacttttgattggtatgtaaatctgaatgggacagcagatgtaaaggcaacatttacagcagaaggcagaaagaagaattgtatcataaaattagaggaaatcgaaaagatttcctcagtacataggaaagagaatgaggacaatgcaaacttcattaaaaaaccctgtatatttaactttctgcacaggctgctatcaataacaagtaatacaccgtatagaataggtacaggaacttcattagttttgataacagaaccccttacgcaatgaaagcgtaaggggtttttatttgtggattcgttataggtttcaaggatatagtcaattccaaattcccatatcctctaatagatccagtgtaatctgtgatgcagtgcttccggaggcctgctgttctgcctgaatatttgtggcaaaaaaatatgtattttgtgagttttcgatatatccgatgaaccaaccatttacattttgcccattgacattaccggttcctgtttttccataaagtgtgttttggccgtgtgtaatcaggcggatggaatcttttacggcagcaatatgttccggattaaaagcaaaggtattttgatagaaatctgtcagcaggctgacttgttcgaaggcagaaatttttaaggaagactccatccagtaagaatcagattgatcgatcgattcgttcccataatgaatctgctgtaggtaagaacggattttgccgtgccccagttttttgtcgattgtctggaaataccagttgaccgaagcagacattgcagagtccaaggtatggtttttattccaggcatcaaacggataatgattgtgatcccatgggatcatggaatcttttggagtaatgattttttcttccaatccgaacagagcactatagagtttgtaggtagaatccggggaaattcttttgtatgcctgttcgggatgataaatttggtaatgatccttttgcaaatcatataatacaaaagtaccttcataatctctgaaataagaagaaagatcaatagtagaaacaatgctgtccgaggtatctgggcggaaggaagtttcctttgcggcctgcatagacaacacaggggacatactgatcaacagtagagaaatcaccagaaccaggacgtagcctttcgcctttttccatggtgtgggagcttgataggaggcgatattaaggattctccgcttcatttgcggcatcgatccgccaagtccgacagagaaggaaaagggagtgtgagaaagtgtctcagcaaaattaattaaagcggcaccatactcctgacaggaagtttcgcctaaggtttccaaaacagaagtatcacaggcgatttcacggtcgatgcgtatttcatgaaggacataccagacagccggattgaaccagtagagtgcacagaaaatatttagaaaaagattcaacaggccatctttttggcgatagtgctgcaattcgtgcaggagaatgtagcggagggcactgtggggataaccggaaatcagacgaagtggaaggtaaatgcgaggttgaaagattccggtaatcgcaggtgatggaagaaaggcagtggtatagacggggatgttccgcgtaataccaagctctttcaggcagcttatatacaaagaagaaatttcagcattttccagaggaagtgctgtactgcttaagtgatatagctgccggacagaacggatgaaaaaaatgaacatgatcccaatccctgtgcaccatagcaaaaaaagaatctgtcctgcaatggaaggaacctgcctgcttatagatattgtaaaatcattcatccattcagaagtgtttgaaaatgtggaagaaagagggctgtctgtgagagggtggtgggcaaatcctttctgggaggaaaatgtactgaaaaatgaagaaatttgtgcgggtagagaaaaagagcataccgggacaaaaggaacaagcaggaaaaagaagagaaggaaccaaagatggtactgcatttgactggagagtgtcctgcgaaatatccatttgcagaatgcaagtatcccgatgaaaattccaagaaacaagtttgacagaagaaaacgaatcataaaatcagccatgttactgtcctccttttcctttggaaagaatagaacgaagagtagcgatttcactgtctgataatcggtcattttcaatgtaggaagacagcatagcggtgatatcaccattataatagcgattcaaaaaagaagaactttcctgacaaatgtattcattttcctttaccagtggtgagtagacaaaaatacgtccgtgcttttcgtaggaaagagctccctttgtcgtaaggcgcttaatcagggtttggattgttttggggctccaggaagtagtacgtgtgagtttttcagtaatctcatttgtattgatcggtgcgtatttccatacgattttcataacttcatattcggcttctgaaatttgtggcaattttttcatagtaatcctccaaatcttacatatgtaataaaaatattataaaggagagagaaaaaaaagtcaaatagcaggtgacaggtagaagtggaaggatgcgtatataaaataaaaataagaagatatacaaaaagtctgaaaaattaagatgaaagtcaatgtttttgtaaaaaatgtcgaaataacattagctttagaatggaaaaagaagaaaaaacatacaaaataaaatgtatagaataaaaaaatagacaaaacacacaacaaatgttatattgacagtatcagaaaaatcggaataaaggaggaagtggatatgaagagaaagcaattagcagcattgggactggcaattgttatggcagtggggactgttggcacatcgggcatcactgttatggctgcagaggcacagacagcaggcacggaagcggaaaaagaaagtcagaatgctgaagctgagtctcagacacaggaggatctctctgcaccacagcaagaagaacaacaaacgcagcagccgatggtcggagaagagcaagatcagcaaccggtaacgggagaagaacttcagacacaacagccggagaaggaagaacaacaagaggtacagcagccagagactgaaagtggtcaggaagcacagcagccggggctcgaacagaataaagaagaaaaagagagcatgacggaagctgaatttattgcaatggtgcaggcagaagtggatggacttttggcagatgcagatgaggttatttttggacctttgatgtatacggaacagtcatggaaggtatatgaagctgcgaaagcggagatgatggcacttcgcgcagatcctatgaaatattatgatctagatggagcacagatttatggaatttttgaacgttttgtcaatgctgtaaatggtcttgaactcattccagaggtggtagacaaatcagaactttatgaattgattgcgttggcagatcaggttgtatcacagacagaagtatatgctccagattatattcaagctttgaagaatgtacttgcaacgattgacagaaataagatcgaagcgatgacgcaagcagagacggctcaggcagtggcaatgttgaagcagttgttacagacgccggtcgtttcagaaagtggagtgatgaagctgatagaggaatctcgtcagatgctggaacagttaaaagtttccggcctgtatgcagatcaggatctggctacaattcaaacattgcttgatgaagcacaaaaggctgccgacagtgcgaactggaatgaagcaatagaaaagctgaatatggcaaatcagaaaatgacagagatctcaatgtctgctgagaaaataaaagaggcattggcaggtaaagttgcagataaagaatacaaagatttgtatgaagatattaaagcacacccagaaaattatgataagaatacaacaggattttatgtcgagtcctatgatcaggcaaaagctctttctgtatccaatgagacagacgtggagaaactgtatgaggcattacagcagatagagtttgcgaagagtactgttatgaaattggaagattctatgaagaatttcatggaagatatggaaaagattcttgaatccgagagaaaaaatgtcggcaaagccggaggctttacaaaagaggactttgacaagatggaggcgctttacaatgagttgaaggaacttcttgcaaatccggatacagagaaggctgtgctccaggagagagtggaagcactgaataatcttcttgtaacggcggagaggattgagaaagaggaaacagtagatccggaacagaaaccagagcaaaagccggaacagaagccagagcagaaaccgaataaagaagaggaaaagaacgaggacaaaaagaagaaatctgaggctccaaaaacaggagatccggcttcgattcttggattaggagtaatgttaatcggaagtggaattgcaggagcagtaggacttagaaaaaaatcggaagattctgaagaatagcggaacggatttcaagcaggataaaatgaattattaaaagaagagcatgtctgtgagtatttgcagacatgttcttttttcgttataagaagttttaggaaacttcaaacaaaaaacagaaaaaattataaaaaacatcgttattaacagaaaaatatgttataatttgtataaaatatccatataaaaatagatgaaatagctttgtttgtgttttggaatcatattttcggagcgtagggaatcgttttttaaatggactaaagaaggtgaaaatatgggaaagaaacaaccgttgtatcaaagtttcaggtatgcgtttgaaggcatttttaccgggatcaggaaggagcggaatatgaagatccattgtctaggagttatctgtgtgactgcggcaggatttttctttgatatttctgcaacagagtggtgtatctgtctgattttgtttggtctgattcttggtttggaacttgcaaatactgcggtggaggcagtagttgatcttgtgaccgaagagaaaaagccgcttgcaaagctggcgaaagatactgcggcaggtgcagttctgattgcagctatcatggcagcatttgcaggagtgattatttttttgccgaaggcggcacaactttttgtaggataagacaggatatctggaaaagatagtcatagggaggaaatttttatggagaaacttggagaaaatgtaaagaaattattgttggcaggaatcggagcagcagcagtgacagcagagaaatcaaaggaacttctggatgagatggtaaaaaaaggggagctgactgtggagcagggaaaggtgttaaatgaagagttaaaacataatctcaaaaagacggtacaggagaatgtccataaagcagaaaagcagacttccacagaagaagtggatgatctgctggaaaaattatcaccggaacagctggaagaattgaaaaagaaactgtatgttacagaaggtgatggtgagaaagacgactgtgatgacagagcagaatgaggttgtagatgagcaaagaagaatccagagaatacaggacaagattaaaagaaatgactgcaattttgcatcgacatgagatttccaaaggattttcaccggagaagcttcgcttgattttggaggatcttggtcctacttttattaaattaggacaaattatgtccatgcattcagatattttaccaaaaagatactgtgatgagctgatgaagcttcgctcagaagtagctccgatgaactttgcagaggtggaggaagtactaaagtctgcctatggatgtccgtgggaagagatttttgcatccatagaggagaaaccgcttggttcagcatccatcgctcaggtgcaccgtgctgttttaaaagacggtaagcaagttgtgatcaaagtacagcgcagagggatctatgagaagatggcgagggatattggattgctgcaccgcgcagtgaagctggttcccccggtgagcctgaaagaactggtagatcttgatatggtgctcgatgagttatgggctgtgacaagggaggagatgaattttctgacagaggcttccaatatggaagagtttgcccggagaaataaagggattctgtttgtgaaagttccagaactttatcaggagtacacaaatcagcatgtgcttgttatggaacatattgacgggtggagcatcgatgataaagcagcattaaaagagaacggatacgatctggaagaaattggaacaaaactgatcgataattatatcaaacaagtaatggatgatggattctttcacgcagatcctcactctggaaatgtaaaggtttgtggtggtaaaattgtatggattgatatggggatgatgggacggctgactgaacgtgacagaaaactggtcggtaaggctgtacaaggtgttgcgctaggggatgtaggaatgattcaggaggcagttttggcgcttggagaatttcgggataagccggatcagagcagactttatgaggacatcagtgcacttctcgccaaatatggtacgacggatatgggtagcattgatgtggcagaagtgatggtagatctgatggaagtgatgaaagagaaccggatcatcatgccccatggtctgacaatgttggcgcgtggactgacacatatggagggggtgctggcagacattgctccggagatcaatatggtagagattgcctccagacatatggcagggaaaattttcacagagaaggactggaaaagtgaattgaaaaatggaggcagaagtttctaccggtccattcacaaagcgctggatctaccttcccttgtggcagatttgattcagggaaatttgagaggacagacaaagatcaacctcgatcttcatgtatctggggaattggagcgattgctgcggagacttgtgagaaatattgtgatggggttgtgggtgatggcacttttaatcagctccagcattatctgtacgacgaatatgaaaccaaaaatatgggggattccggcacttggtgcgtttgggtatgtcagtgcatttctcattgtgatgtatgtatttttgaaacatattttttcaaagaaatagaggaaatacagtaagagacaactaaaaaagaatggtttgcacattattgataagaaaataacgtacagaccatttatttttgtcaaaacaggtgtcttgtcacttgtaaaggacggtgctataatggtaggaactgaggtggagaagaggataggagaagacagaatgaaaatagtagaagagattaaaaaatggaaacaaaagaaaaatgcagtcatccttgcccattattatgtgaatccagagatacaggagattgcagattatattggtgattcattttatttaagtaaagttgcagttgggttaaaagaacagacaatcgtattttgcggcgtttctttcatgggagaaagcgcgaagatattaaatccaaagaagaccgtgctgatgccggatctgactgcggattgtgcaatggcacatatggcagatgcagagaccattcagaagatgagagaaaaatatgaggatctggcagttgtatgttatatcaattccactgcagagttaaagagacattcggatgtctgcgtaacttccgcaaatgcagtgcagattgtaaaggcattgccaaataaacgtattttctttattccggataaaaatctggcgagatatgtggcagaacaggtgccggagaaggaatttgtatttaataacggatattgcccagtgcatgagcatatgcagttagaggagatcaagaaagtaaaagagcaacatccgcaggcggagattctcacacatccggaatgtccggaggctgtgtgtgcgatttcggattatatcggaagtacatccggaattattgcatatgcggccaaaagctcttgcaaagagtttattgtctgtacagaaaatggggtgcgctatgaattggagaagcaaaatccagataagaaattttattttgcagagacggaaccggtttgtccggatatgaagctgatcacactggaaaaaattcttcatgtgttgcagacaggcgaaaatgaagttcacatcacagaagatctgcgtaaagaatcaagaaagacactggagcggatgttagaactcgcgaaataagaaaaaatgaacgtaggaaaaagtaaagacagaggaactggaggaaaaagagatggagataagtgcagacatagttgtagtgggaactggagtaggaggtttattcagcacactttggctgccggaggagaaacaagtcgtactgatcacgaaatcggatttggagagcagtgattcttttcttgcacagggaggaatctgcgtactccgagatgaaaaggattacgagagctttttcgaagatacgatgaaagcagggcattatgagaaccgaaaggaatccgtagatctgatgatacgaaaatccagagagattattgacgatctgattggatttggagtcgattttgaacaggaagacggttgtttgaagtatacgagagaaggggcacattcgtgtccacgtattttatttcacaaggatattaccggaaaagaaattacaagtaagttgctggaacgtgtaaaagagcggaaaaatgtgacaatctttgagtatacaacaatgacggatattcttgaggaagatggcaaatgtactggaattcttgcagaaaatgaacaagggacattgcatatccatgcagcagataccattcttgcaagtggtggaatcggcgggacttatcagcattcgacaaactttccgcatttgaccggagatgcgatccgaatcgcaaagaaacacgaagtgcggttggaacatctggactatgtgcagatccatccgacgacattgtattcgaaaaaaccaggaagacgctttctgatctcggagtcagtgagaggagaaggggcagtgctgtacaataagaagcatgagcgttttgtcaatgaattgcttccgcgggatgttgtgacaaaggcgatccacgaagaaatggaaaaagatggaacagattacgtatggctttcgatggaacatattccaaaagaaacgatcctcggtcactttccaaatatttatcagaggtgtctggaggaaggatacgatgtgacaaaagaatgtattccggttgtgcctgcacagcactacttcatgggaggtatctgggtagatctggacagccagacttcgatggaacatctttatgcagtaggggagacaagttgtaacggtgtgcacggggcgaatagactggcgagcaattcgctgctggaaagtcttgtatttgccaagcgggcagcgacaaagatctccggggaatctgagaaaagatatcgataaagaatcaaaagataagaacatcaatcagagcagttgtgatatgaaatagatatgggaggtaaaaaacatgaataagattacaatgacacttcaggtggatcacctgattctggaagcgctgaaagaagatatttcaagtgaagatgtgacaactaatgcggtgatgaaagaagccgtaaaaggagaagtagaattgatctgcaagcaggatgggattattgcaggattggaaatttttgaaagagtatttaaattgcttgatgcagagacggaagtaacatttttctgcaaagatggggacaaagtgacaaatggacagttgatgggaaaagtgacaggagatatccgtgtacttctttctggagagcgtgttgcgttaaattatcttcagaggatgagtgggattgcatcttatacacgttcggttgccgatcttttagaaggtacagatacaaaattgcttgatacgagaaaaacaacgccgaatatgagaatttttgagaaatatgcagtccgtgtcggaggagcgtataatcaccgctacaatttgtctgacggagtgctgttgaaagataaccatattggggcggcgggcagtgtgactgcggcagtgaaaatggcgaaagaatacgctccgtttgttcgaaagatagaagtggaagtagaaaatcttgatatggtgagggaagcagtggaagctggggcagatatcattatgcttgacaatatgtcaacagaagagatgcagaaggcgataagcatcatcgacggacgtgctgagacagaatgttccggaaatgtgacaaaagaaaacatcggtcgtctgacttctcttggaattgactatatttccagtggagcattgacgcattccgctccaattctggatatttccctgaaaaatcttcacgcgttagaaaatgcgtaagtggaattaagaaggagatggagggaacaggttgcaagggacagagagaagagaacagatcattcacgaaatccgtgagagtactgcaccggtatctgggaaaaagctggcagccctctacaatgtgagccgtcaggtgatcgtgcaggatattgcgttgatccgggcggcaggttatgatattctttctacaaacagaggatatattttgcagacaccggcaacagtcagccgtgtgtttaaagtaaatcatacggatgagcagctagaagaagagctttgttcgattgtagatatgggcggttgtgtagaaaatgtaatgatcaatcatagggtatatggacatatggaagcagaattacatattaattccagaaggaaggttatggaattcatcggtgatatcaaaagtggaaaatcaagtcctctgaaaaatatcacctcgaactatcattatcataaagtaagtgcagacagtgaagaaacgttggatatgatagaagaggtattgcggcagaaggaaattttgattgaaacagcttaaaaagcagagaggaaatggacaaagatgtctgtttcctcttttgtgtgtggagagtatagaaaaaatgtaagggaaaagaaaatgacgaaaacaggcagctgtgttataatttaccaaaagaagcagaaagaagggagaaaacgagatgcggattttgattgcagaggatgaaagagatttaaataagattctggcgcagcggctgatagcagagcattacagtgtcgattcctgtatggatggggaggcggctcttgattatcttgcaggggcagagtacgatgttgtaattcttgatattatgatgccaaaaaaggatgggttatcggtacttcgggaaattcgccagaaaagtaaacatgtcccggtgcttcttttgacggcaaaagacagtgttgaggaccgggtgcggggattggatgcaggtgccaatgattatctcgtgaagccatttgcatttgaggaattacttgcaaggatccgggtacttttgaggcggcctgagaaatcagaggattcgtgttatagagaaggcggtttggaagttcatgtagatacgcatcaagtatttcgggatgggaaggaaatccagctgtccggcaaggagtttgccttgctgcgctatatgattcagaacaaaggaattgtattgtcgcgggaaaaattggagcagcacttgtggaattatgattatgcgggcggttctaatgtgattgatgtatacattcgctatctgcgaaaaaagattgacgaatcgttcgaggaaaaactgatccatacagttcgtggcgtcggatatgtgctgaaggagaaagtatgaagcgatggacattaaaagcaagactgacattgttctacacaacattcctgcttttgcttacctgcaccacacttggaattttattctctatgagtggcagaaaagtgctggcttctgtgaaaaatcagctggagaactctgtgcaaaagagtgttgaggagattgaaatagaagatggcaggctggaagtagacaatgatttttattctgtagaaaaggggatttatctgtctctgtacgatgaaagcgggtattttctatacggaaaagttccgtatggaatcgagaatgcctatgcgcttgaagatggaactatgcgtgagatcaaagagaataagcagaaatggtatttgtatgatgtgttgtatcggctggaaaacgggcagaatgtttatgtgagggggatggcgtccatcaatgatgcagaagaaagctttcagattacgatgcggtttgcagtgatcctgctcccgcttttcacattggcagcagcatttttgggttatcagtttacgaaaagggcattgctcccagtaaaaaaaatgacagacacggtccggcagatccaatcggatgcagatctgtccaaacgagtagggctgacagaggagcaaaaagaaagtaaagatgaaatctaccatttggcacagacctttgacgggatgctggaacagctggaaatggtatttcaaagagaaaagcggtttacttccgatgtttctcatgaactgcgcactccggtgagtgtaatgctggcacagtgtgatgcatgtctttccgaggaaacattgacggacagacagagagagcagatcgggctgattgcaaaaaaggcgagagagatggcggggctgatttccagcctgcttttgttatcccgggcagatgaaggaaggcagaagttgaataaagagagggtaaatctcagtgaactgacacagatcattgcggaagaacagcagatgatcgcagaggaaaaagaaattacggtcagaactgagattactccggatatttatgtacaagtggatgaaagtttctatatccggatggttgtcaatctcgtatccaatgctgttttttatggaagagaaggtgggattgtaaaaatttctttgcaggtaaaggaagaaaatgtagtcggaatcgtggaagataatggaattgggatttctgtgcatgacatggaacatatctgggaacgcttttaccgtgcagacacttcgcgcacagatggaagccattttgggcttggactttctatggtaaaatggattgccgaagcgcacggtggcagagtgtctgttgagagcagagaaggggaaggaagcagatttacattttatattcctttttaagtattttctaatgttcttttaatgtttctactgtatgattcagatacaaagtaagaaacaagaaagaaaaaaagaagaaaaggagaaaacagatatgatgaaaaaatacatggcagcaggaatcgtagcaatcagtgtattaggagcaaccacgggatgtgggttcacaggtggaaaggacattggaaaagatgcagcactggaagcggcacttcaagatgcgggtgtgacgaaggaggaagcgacaagactaaaaacatcgaaagacagagatgacggaagaatgatctatgaaattcaattcgatgcaaatggaacagaatacgattatgaaatcgcagcggaagacgggacaatcttaactgctgatacagaaagtgtcgcttccaatacggcagcacaaaataaggatacgcaggggaaagaatctgcacaggaagcacaaaatggacagcagaataatacgcaaaataatcagtcacaaagcgcaggagcaaatgtggcggtcagccaggaacaggcaatgcagacggcattagaaagaattccgggggcgacagagtctgatatccggatggaacttgacaacgatgatggacagtataaatacgaaggggatatcatctacgatcagagagaatacgaatttgagattgacgcgaacacaggagttatattagagtggagtgaagagagaagataacgaaaataaatcaggtaaacagaagaaaaaggagaaactatgtcagaattttataaatttttttcccataagcaatgtgaatatttcccatgtcataagacagacgatccggacaattttaactgtctgttttgtttctgtccactgtacttaaaaggagcagagtgtggtgggaatttcagatacacagaaaaaggtgtgaaagattgtagccagtgcatgtttccgcatgaacggaaaaattatactaagatgatggaaaaactgcggcagaagtaaaggaaaaaatctccgaaaaattccagctagagactgttggagcatttacatttttaaataatgtagcctctatccgggtactggagaaaaatggatttgagaggaaagaagtatttgaggaagaaggaagaatgtcggcatattttcaaaagaaaatataatggttttttatttcaatggatatgaaaataggataatagataaatactaataaaagtatatatataaaatcttaaaagagtttgaaattttgtttgatgaaaaaaatagaaaatctactttgaacaatgaaagaccagtcaggtaaatcggattctgactggtctttttctgaaaagcagatagataaaattaatcagaatacttttctttgtaaaatgagtatttattaaaaaatttcattttgatttttggcaactgccttaacggaaattccattgatctccacatggtcatcgataccaatcacgatgcagcggcgcccatcaataattcttgtttcgaccaggtcggaacgttccgggttgacattgatcacaacatctggggtgcggatctcaaactttcttgtattgacaatgttagttgcaagaaaagatggctgttcggacgaggaagatgaagttgcctgttcaaagttccggtcaaagtcttccaaatgttcttcggtcacaccactgtgggcaaaaagtttttttacttctgttttgtcaagggtaaccggttccggggaatctttcttttcttcaagcatttcatagagattctcatggatatttttgaccacttcatagtcacgttcttctccgagtgtttcttcgatcagtgtctggaaagtttctttctgtcctccggcagataatggaagaatggcaccgagtagattttctacaagagaagcacggagttcttcggcatttttggcgtaataaagaatgctgtgcaggtcggtgctccggtcattaaaggcaggaaatagaaatccgacatccggcatttctacgatccagtcgcggacgcgttcaccaaaggtgttatcttctgcatggtaactaagccctggtttagaaagctttaccggacagatgctgcagagcagatattcatatacttcatcggaggcatcgaacatttcgctcccatcactggattttcccggaatgtcataggcggcgtgaatgacaaggatcaggtagttctcgccatagtcgtaagattcgatgatccggtcgtagaatgcatccagaagcgcatcatcggtcagttggctggcacgaagtttcaggagaaaatcctgagttcctcccgcattttccgcagagagagggaattccatgttgagcagattttttccaatcgtgccggacagtgtcttgcgaaatagttcaaaatatttgaagatttcttcttcaggaagagagagaaatgcttcttttaattgtgtttttttatttttttcgccgtcgacatagcagccacagatgcgggtgatcgcgcagttgtccggcgtaaattgctttttgatttcggatacttcttttttattcataatctaaccaccttatctatctaaatttttttgaacaaactaagagcgtgccagaggatctgtgcacgctcttcattataacaagtccaaaagaaaatagaaagaaaattcttttgttctttaaaattttctgtgactattctactccattaaagcagtaagtacatactttacaaggagacagcccgatggatgcaatcagatcatccagtctgtgatagcggagtgtagtaaagttttgttctttgcggatcgcttccagcatgtcggcatagcgctgactgtttggatctgcatattcgcttaaatatttctgtgcatcatcgccttctttctcttggatcacacgtcttgtgatcagatccagttcggatttggagcgagagaaatttaaatatttacagccgaataagagtggcgggcaggcagggcgtacatggacttcttttgccccactattgtaaagaaattctgttgtctcacgaagttgagttccgcgcacaatggagtcatcgatcagaaggagactcttgtcttcgatcagagactgtaccgggatcagtttcatgcgggcaatcagatttcgctgttcttgattttgcggcataaaagaacgcggccaagtcggtgtatatttgataaacggacgggcaaatggaataccggattcattggcatagccgatggcatgggcaattccggaatctggaactcctgcgacaacatctggtcggacatcgtcaagtgcatcacgttttgcaagcattccaccgcatttgtaacgcatttcttctacattgacgccttcgtaggaagaggtcgggtatccatagtaaacccaaaggaaagaacagatcttcatatcttcttttggttcactgacagtctcgacactatccggtgtgatgtaaacgatctcagcaggtcctaattctttgtagtcgctgtaaccgagattgatatatgcgaaactttcaaaggagacacagtaggcatctttcttatgtcctacgacaagcggagtacgcccgcgtctgtctcttgcggcatacaaaccgtcttttgtcatcagaagcagtgtcatagagccgtctacgatttcctgtacatactggattccttctacaagagaatctttctgacagatcagggaagcgatcaattcagttgcgttgatctgtccgccgctcatctcctggaaatgtgtatgtccatgggcatacactttgtctaaaagttcgtccatattattaattttgccgaccgttgtgatcgcgaagcttccgagatgagactggattagaagcggctgcggttcgaaatcagagatacagccaattcctaaatttccttgtaattcttctacatctcgttcaaattttgtacggaatggtgagttctcgatattgtgaatggctctgctgaaaccgcttggaccaaaagtagccattcctccccgtcgtgttcctaaatgtgagtggtagtcaacaccgtagaataaatcaagcgtacagtttgattttgcggcaacaccaaaaaatcctcccatgtgttcgtctccttttctatgtgtaaatttgaaatatgtttcattgacagaataagtttagcacgattcagaaaggaaagcaaagggggatgctgggaaatggataattatttttaaagagaaataataagcagagattataaatcagttgcagatagggacagttgtgatctgatcagaatagaatattttgagaagtcagtaagggagaagtgcagacaacagttgtaactgcaagaaaaatccaatataatagaatgggcaaaataataagtatgtgtaataagtatgaggaaaatggagtggcaaaagatgaaattatttcatatatcagatttgcatatcggaaaaattctgcatgaggtcaatcttctggaggaacagaaaattgtcctggcacaagtacttgcgcttgtggatcttcatatgccggatggaatcctgatcgcgggagatatctatgataaggcagtgccgtcggcagaggcggtaaaagtatttgacacttttttaagtgaactggctgaccgggggatttccgtctttttgatcagcggaaaccacgattcgtctgagcggatccattttgcaagccggattttgcagaaagaaaatatttttatcaaggggatttttgacgggaaactggagccggtagaactcaacaaggatgggcagaaagtttctgtttatttacttccttatataaagccatttgatgtgcgtccgtattatccggaggaagagattgacagttatgaccgggcggtgcgaacagttctttctcatgtagatatcaacccggaggctgtgaatgttcttgtcgctcatcagtttattaccggggcagtttcttctgagtcggagactgtgatggttggagggcttgacaatatcggtgccgatgcatttgatctgtttgactatgtggctcttggacatcttcaccgggcacaaaaagtaaaacgggagactatccggtactgcgggacattattcccgtactcatttgataaaaatgagggcgaaaaatcagtgacaatgcttacaatcgaacaaggaaaagagattgtggtggatacacttgcaatccatccacgccatggactttgtacagtatctggatcattgcaggaggttcttggtggagaagggtgcgaagagtatgtgaaggtagtactgactgacggggaagatcaggtggatgtagtaccaagacttcgagtgaaatatccgaacctgctgacagtagaatttgaaggaaggatgcgtgccgctttagaagggatcaaaaatgcagagcagattgcagaccgctcgccgatggagttgtttgcggagttttttgaagagcgaagcggggagaagctggcggaagaagaccgaacgcttgtggagcagatgatgagagaacttttagagggaggagagagctgataatgagaccgatcacactgacgatgaatgcatttggaacttatctggaagagacgacgattccgtttgagcagtttggaacgagcggacttgttttgatcacgggagataccggtgcggggaagacaacgatttttgatgccatttcctatgcgctttatggggagaccagcagcggaaataaaaggcggaagccagagatgctgcgaagtgattatgcagatgcgaaaaacaaaacgtatgtgagcctgacatttgaacaccagaatgagcaatatacgatcacgcgctctcctgcatattttcgggatggatatgcgacaaagactgctgccacggtggagatgctacttccggatggaactcggttaaagacggcaaaagatatcgatggggagacaaagggaggaactatcctatttcctgggaagatacgagaattgcttggaatctcactagaacagttcagacagattgctatgcttgcacagggagattttttgaaattgctgcatgcagagacaaaagagcgggaaaagattttccggactatttttaatacacagattttctttgatcttcaggaaaagatttctgcaacttatcttgataggaaacggagatacgaaagcctccgacaaggggcagaggagcaattaggagaaatacggcttccggaggaagaaacttacgagaagaagcagccagaggcagaagaatgttgggagcgcttaaaaaggaatgtgaaggaaagaagactggaagtgctagacgagattattcgtgatctgaaagtagtcaatgccattgatgtagcagaattaaaaaaacttcgtgctgcggaagaacgtatgagagagcatctgacaaaactgcaggattatgacagagaaaaaggacgccagaggagaaatcaagaagactgtgagaagttttttcaagagagggagcgtctggccgtgcaggtacagtctgcacaggaagcttatcagcaagcggcaggtatcgatcagacaccgtggatcgcagagaaagatcagattcagaagcagctagagattcatggaaaattagaaatgatcagaagcaactgtaaaaaaagcgaggcagactggaagaacaaggaagcacagatccagcaggaaaaactatcagcggaaacgatggcagaagaaaagaagaagattatagaacagttgaaattgtgggaaacacttccaatccgtcaggaacaaaacagacagcgcagagagcagtggaaggcgcaggaagaaattttaaaacgccttcgatacatgcaggaagaaatctacaagaaggagacagagttaggaaaagttcgcaaacgattgctaggagaactttgcaggaaagatgaggcaaatcagaagtacaatgaattggatacgaagagcagggcgcatatggcgggaatttttgcagcagaattgatagatggaagtccttgccctgtttgtggttctatttctcatccatctccggcaggaagggtgagtggtgtgccgactgcggaggaagtgaagcgggcgcagaaagaacttgagcgggcaaaggaagcctgcgatcatacacaagaacagattcagagaacagaggcggcggtggaaaccgagaaaaatcatctgagacagcgtttgagtgaattgtcaaaagcatcgtgggagacgaaaagatttgaagagattgcggaatatctagagcagcttactgaaaaaatcacaaaccggatagaagagttgacgaaggaacatgaggaattagagaagcaaaaagaaaaacaagaggcatggaacgcacagctggaaatgattgaagcaaggcaaaaaggacaggaagagagacaaaaacagctgcaggaagacagagagcggctgcttggaaagtatttgtctgataaaagtacactggaagtgatggaaaagcaggtgacatccgcgaaagagcagttggagtcgcagcttactgcgtgtatcaaaacgctggagaaaatccgaagagataccgaagctgcacagaagcagtatttggcatcgaaagaattggcggataagacagaaggacaacttcgggtggcgaaagaagaaggagatcgtctgcaaaatctcttgaaggaacaggagaaagagctcttccggttggaaatcttatccggaacagaacaggaaggggagagagcagagaaggaagcttttatgaaggaagcttgtgcacagttccacgaagcgtatgaggtttacttacttcggtccgataaaaatgcggagtgtgtccgaaaactggaaaagcgggaaaaagagctgggacaggcggaggaagcgtttgtccagattcgtcggatccatgcagcggcaaatggaaattacaaatttgagacgtacattcaaggggtatattttgaccagatcattgcgcaggcaaataagcgactgaccatgatgatgcatcagcagtttgagttgaaacgcggggaaaaaactgtgggaaacagagggttggatctgtttgtttatgattaccgaactgcgaaaaaccgagatgtgcggacactgtccggcggagagtcatttgtagcatctctggcgatggcgttgggactgtctgatattgtgcagcagcataatggaggggtgaagctggagactatgtttattgatgaagggttcggttctctggatgcggatacactggagcaggcaattcgcactttgaatcaaatgtcaaaaggaaagtgcctgatcggtattatttcccatgtggaagaacttagaaagcgtattgataaaaaaatttatattcataaaacaaaccagggaagtcaggcggaattggtagtgtaggaggaaacatgcagaaagaaacagaacagaaaaaaagaaaacagatggaaaagtttgatatgctcggaaaacatcctgggagagcgctgatattttttgcggtgcctatgatcctgggaaatctgctccagcagttttacaatatggcggactctgtgattgtcggcagatttgtcggggaagatgcacttgcagccgttggcgcctcgtactcattgacgaccgtgttcattatgatcgccattggaggcggggtaggagcctcagtcattatttcccaatatctcggggcgaaggaatatacgaagatgcagaccgcaatttctaccgcacttttgacatttcttgcaaccagtgtgatacttgcagggtttggactgtttgcgaacagggcgattttgtcttcgttaaagacgccggcaaacattttggaagatgctgtgttgtatctgaatatttattttatggggcttccatttttatttatgtacaacgtactttcgtcaatcttcaatgcgctgggaaaatcaaatatcccgctgtatttgttgatgttttctacagtactgaacattgcgttggatcttgtggcggtaattgtattccagaagggagtcgcgggagtggcagtggcaaccgtgtttgcccagggaattgcctcggtgctttccttttggatcctgctccgcagactgaaagaatatgagggggaggatactccgaaaaaatacgatatggaaattcttggaaatatggtaaaaatagcaattccttccattattcagcagtcaatcgtatctatcggaatgttacttgtgcagtcagttgtgaatggatttggatcatccgttgtggcaggatattccgcggggatgaggattgagtccatctgcattgtgccgatgattgcaatgggaaatgctatttctacttttactgcccaaaatatcggcgcaggacagaccgatcatgtaaagaaaggatatcggacagcacacggaattgtatttgcatttgcagtagtaatctgtgtgacattacttctgctgaaaaagcagattatttccatgtttgtgggaggcaatgaaagctctcttgcatttcagacaggaagttcgtatctgtcttttatcgcatatttctttgtatgtattgggctgaaagcgctgacggatggggtgttgcgaggttcaggagatgtggttgtatttacacttgctaatctctgcaatcttgcagtccgcgtgagtattgcctttatttgtgcgccgctctggggcgttcaggcagtgtggtatgcggttccgcttggatggatgacaaactacatcatatcctttgcgagatatctgactggaaaatgggagagaaagaggttgatctgacgttagacaagaacagaaaggaaaagtggttatgagacaggaaaaattcaagatggaacggcaaggacttgtggaagaagatcagaaagtgaaagtgacggagagggtcaatggaagtctgtacagctatgtagtggagccggcggtggcaatgtctggtatttacaggagcaatgccaggattcaatccagagaagggattatccgggaaattcagcaaaatgacagaggattttatcttctcgtagaatttgaggaatagatgacaagtggaaaaacctgtgctataataaattttgttgtaaaaatgtcgctagatatgtattaggaggaaatcaaaatggtagcaagaaaagcagcaagaaaaatgaacaataagaacaatacagaacagagaaaagcgactgcaaaaaaagcaacggaagctacagtacagagtgcggaagaagttgtgatggcaacagaggaagagacagtagaggaaaaagcagttgagacagtagagaaaaaagatgccgtggaagaaaagaagacagaagagaagaaagcagtaaaaaaagcagctccgaaaaaggagatgaagacttctgtagtagtagaatacaagggaaaacaggtagaagaaaaagagatgatcgcggcagtgaaaaaagcgtggacaaaatctggacgtcggatcggtgagatcaagacaatgacactttatgtaaaaccagaggaaaatgcggtgtactacgtgatcaatggaatcgatacaggagcagttcctttttagaatgtgggacgtatctgcaaagtgattttagcagatatgtcctttttaatagaaaacaatgaaagaaaaactataaaaatagaaaaaacagaaaataaattcgaaaaatctgaaaaaagtattgacaaatctgaaaagtatgttattatatagtcataaacataacaaatataaataagaaacagaaaggaaattgaaagacctgtcattatttttatttcttatgtggaacggatataactttaacggacggagttatataatagtagaagcaaagatgtttgcacaatctaagataaggaggtacggaccaccagaaagagtaagaaaatctgacaaatgataaaaaagttggatgtatacccgaaagaagatcagaaagtcagacacaaaagaatggaagctatgtatcagttaagattcagatttttggatggtgtgctgtatgaatagaagatttgtatgacgcattatcggaagaaaagaaggattaagactacacagtattcagaaaatgaggtaaaatgaatgattgaagaatcaaagtaagagtaggtattgattagcaaagtgattgatacctactcttactatgtaaaaatgagagcaggagaaggaacgatgataaaagcagttatatttgatatggatggcgtgttgatcaatacggaaaaatatcttgtgaaatattggtgtcaggcagcggaagaattgggaatgccgatgaagagagagcatgcattgatgattcgcagtttttcgggaaaatttgcagagccgtggttaaaagcaatatatggggagacatttgattacgttgctgtgagggagagaagaaaagaaatcatggcggagcatttggcaaagaatggggtggagatcaagccgggagtcaaagagactttgaactatttaagggaaaaaggatacaaactcgcagtggcaactgcgacggatcgagaacgggcagaagcatatctggatgaaattggaattacagaaatgtttgaccggattgtctgtgccaatatggtagagaatgggaagccaatgccggatatttatctgtatgcctgcgatcagattggggtgaaagcagaagcatgtgtggctgtggaagattcccctaatggagtgaaatcggcgtatggggcaggctgccgggtagttatgataccggatctgacacttccggatgaagagacaaaaggttatctttggaaacaagtagaaaaaatgaatgatttgcagcagattttataaagacaaatctacacatttactaaaattttacatcgatttaacttgtaattgacagtgtgaaattaattatgatactcttgaattacaaaagtcatagagaatcatagagagtcagtgacagggaggcagtgccatgaagaaaagaacaaaagctgttttgacaattttctttttgtcattgcttttttttgtggaaataaatgtagaggcgagaagtgtcagaaacatgtcggcatatccggcaaagcatggtcagtcttttgtacagagtgtgtggatggagcagaaggaagtctttgatgccagcttgtaccaggcggtactctgtaccaaagatatgaaacagaagaaaagcaatgaaggaagttttttacaacaatatataccattacaacaatggctcacaggagttcttttatggtccatgtgcagtgtctgggtgattcccgatattataggggttcagaagagaaaagtctggtatcatcagacgcggatggagatcatacatttgggagatggaaaaagcaggattccgatgaatagataggaaaagagatttgcaggcattttagaaatgtctggagaaaagaaatgagatatattcggaggaaacaaaagaaatgagaatggaagatattttaatgttgcttggaggtttggcgctgtttctatacggaatgcagatgatgagtaatgggctcgagacggcagcgggcaataagatgaaaagtattttggagaagctgacatccaataggatcaaaggtgtcgtagttggggctgtgatcacagccgtgattcagtcttcatctgctacaactgttatggtggtgggatttgtcaattcgggtctgatgacactgaatcaggcagtctgggtgatcatgggagccaatatcggtacaacgatcacaggacagctgatcgcacttgacatcggagcaatcgcaccgctgatcgcatttggaggtgtcgcagcgattacatttgtgaagaatgaacgagtacgccatatcagtgagattttcgccggacttggagtgttgttcatcggtatgggaatgatgggagatgcaatgcagccgctccagcagtccgagacatttgtcaactttatgacaaaagcaagtaatccggttgtaggtattttagtaggagcaatctttacggcggtcatccagtcttcctctgcttcggtaggaattttacaggcattggcagggacaggtgtgattccgctgtcaagtgctgtttatgtattatttggacagaatatcggaacttgtattacagcagttctggcatctatcggtacaaagacaaatgcaaagcgcgcgaccgtgatccatttgatgttcaatatttttggttcgatcttatttacatttatcagtatgctgacaccgtttgtgtcatgggtggaggcactttcgccgggcaacacggtagctcagattgcaaatgttcatacaatctttaatattgtgacaacactgatcttacttccagttggaacttatatggcaaaattggcagtattgatccttccggaggaaaaagaagagacaatagaagaacgaggactcaaacatatcaaagtatttgaaaacagctattcagtaggaaatgaggctcttgcgctctcagaattggagcaggaagtggatcggatgcgcggaatggttgctcaaaatatagaggaaagttacgatgcagtcttgactggaaatttaggagcatgggattctttaaaagagagagaagagtatattgattatctgaatgcagaaatttcaaaatacattgttcgccagatgtccggagaaaagtcggttgcaggatctaagagtatgagtagttactatattattgtaggcaatattgagcggatcggagatcatgcaatgaatattttaggatatgcaaagaatctgaacgaatggggaatccatctgtcacaagaagctttggaggaagtaagacagatgaagaaaatttgcgagaaagcgctggcagatatcagtatgcacaatggaagcagaaaggaatttcttgagaaggctgcgcggaatgagcaaaagatcgatgatcttgaagaaatgtaccttaagaaacagattgagagaatgaagtcaggatcctgcaatgcagaggcgggaattctgttctcggaactgttgacagactttgaaagaatcggcgatcatgtgttgaatattgcggaacagtatcagaatatggtgcgatagagtggagttgtgatcaattaggatgcgagtgaggaacataacattcaaccaataaaaatattaataagaatcaggataaattgggaaaagacagaacagtttatcctgattttttaattttttaatctttctaatatttttgttctatcattgaactttacagaaaaaagggtataataaaagtagatagtaagacaaggaggcaggcttatgaagattgatatgcattgtcacgtaaaagaaggttctgtggatagtaaggtaagtctggaagaatatattaccctgttgaaagagaaaggttttgacgggatgttgatcacggatcacaacacatacaaggggtaccgatactggaaggaacatatcaaagggaaaaaacatacagattttgttgtcctgaaaggaattgaatatgatacaagtgatgcgggacatattattgtaatcatgccggaaggagttaagatgcggatgctggagatgagaggacttccggcagcagtcttgattgattttgtacatcgaaatggtggaattttgggaccggcacacccgtgcggaggaaaatatttgagttttacgaatacgaaacgatattttaagaatccggaactgatcaagcggtttgattttatggaagcgtttaatgcgtgcgaatcggtggagtcaaatgagggagcactgcggctttcgcagaagtatcagaagccgggaatcggaggcagtgatgcccacaagccagaatgtgtcggaaaaggagcgaccattcttccggagagggttacttgtgagacagagctgatttctttgatccgtaagaaaggtcctttagaagcaggtggaacactctataataagacgacaaaagaaaagatgggaaaggctggaaaacttctcacgtattctttttggatttataacaaaggcggagggcttttgaaatattataaaagaaaagtaaaaggaaaagaggagaatccgatcgatccgatcgatccgatcgagctccattatttgaataaataaagcttttgttcagaaagtcagatcaatcgtttgcaaggagggacgatgaagttttttaatcaaatgatcatcacagggatgctgacaaaaattgcagttacagactggaaagaacagaagattttcaatcaggatgtcacaatattgttctgttattgtctcatgcagttattcttttgcctggatcaaggtgaatggggaagacttcttttttatgtgatttctggagtgtgttctgccagtggggtgcttgtgctgattacgattttaagtccaggagcctttggaggaggagatatcaaattaatggcagcagtgggaagtttgctggggcctgtaaaaagcctgtattccctgactgctgccattattctatgtgggatctatattcttgccgggatggcaaatggtaagatcaaacgaaattcagttgttgcatttggaccatttctctgtgctggaatcttataccatctgtggagcatgcccatctgatcttatcagatggactgtcatttcaactacacctatctagaaaatttccatatttttgaaaaattaaaataacagtccgatatggtatacgaggaagctcataacccatgcgacagcaaactggaagaaaatgatcagtgctgtcagttttttgctctctacttcccggttgatcgttgcgatggtagcagtacacgggatataaagaaggcaaaataccatcagtgcataggcatttgctgccccgaatccaagagcgccgagtgttgcaaccatggtactcataccatctgtagttgtaatgttttgtaccccaaataagacgctgcagcttgatacaacgacttcttttgctgcaattcctgcaatcagggcaacgacaatctgccagtatccgagtccgactggtgcaaagagaggaacagctgctttcccgatgatagatccaaagctgtttgaaatatctgttacatatccggaaggaccaaagtttaataatccccataagataacggaagcaacaaagatgactgttccggctttcgtgaggtagtcctttactttctcccagacatagattgcgattgttctggcatttggagacttatattccggaagttcgatcaaaagtgcatgttcggctttgcttccatctaatttggataagacaaaagcagtagtgatcgcaacgatgattccgagcagatacatagagtaagatacaagcatcgcatgttttggaaagaacatctgcgaaaacaatacatagattggaagtcttgcactgcacgacataaacggtgtgatcaaaatagttttcaaccggtctttgcggtgttccagtgcacgggaggccatgacagcaggaacagaacatccaaatccgagcagaagcggaataaaagcacgtccggaaagtccgagatgtcccataatatcatccatgacgaaggcgacacgagccatgtagccgctgtcttccaaaaaggcaagcgcgagaaacaggatgaaaatgtttggcaggaaagtcagaattccgccgacaccggagatgataccatctacaactagggaaatcatcatgtcgcctacatgcagggaggtaagtccgcttgtcactgctgccgagaaggattccagaaagatttcaaaatatcctttgagccagtcgccgacggtaaaggtcagcagaaagacaagtgccataattccgagaaagagcggaagtccccagatcctgtgtgtgagaaagtggtccaatttctcggtaaaagcttctttttctgatttgttgaccagtatctcctgaatgatctcctcgataaaatcgtatttttgattgatgatctcctgttcatagctgcggtcgatgatcttctcaagatctggaagaggaaaggccgctgtgacagattcatctttctcaaggagtttgattgcatgccatcgagggttttcaagcgttgggtaggagcaggcgagtgcatccatgatcacatcaatcttatcttcaagcgcatctgaatagaccatcgcatattctgtatgatgattgtgttcatgccggctctgtttgtcgtgatgatgatgaatcagaggattctggatcgcatggtctgcatgatgggatactgcgtgcatcagaacagagagcccgcttttttttcgtgcagaaaccggaatggcaggaatgccgagcatttccggaagtctgtgcagatcaatttccattccacgttcttcgacgatgtccatcatgttcagcgcaagaatgaccggtttcccaagctcgatcagctgaagcgtcaaatacaggttgcgctcgagacacgaggcatctactacgtccacaatgacgtcaatctcatcgctcatgatgcattcgcgtgaaactttttcttccattgtataggaagttagactgtaaattcccgggagatctaccagtttgaactgttctccctcataagttgtatagccttcttttttctcgaccgtgacgccaggccagtttgccaccttgaggttcgccccggtaaaggcattaaaaagtgtggttttcccacagtttgggttgccgatgaatccgacattgatcgttttactcatgggaatctgcctcctttactgtgatatgatctgcaatccgctttccgacagcaaatcttgtgccgcggaactttacagtcatggagccacgtttttgattatttaaaatagtgatgcgggttccgggggtcagaccaagtgcttccagccgacgttccagtggaagttccagatccatcgcctctacaatgtaagtcgtgttatcttttccttgttttaactgcataggatcatgtttctccttttgtaattgtgttaatgataatgattattcattatcattataataaagaaccggggaaagtacaagaatttctgaatggaaattgcaaaaagatatttacagagaagaagttcctctatataatgaaatttatctttaaggcagaatgctgctgaacgtgtgatatggtaagtagcagaaggaaaagaaagggtgagagtatgtcggtttattttatcttgctatatttttttgtatatggatttcttgggtggtgtacggaagttgcatttgcaggtgtcaaggaaggaaagtttgtcaacagaggatttctaaatggtccgatctgtccgatttatggagtaggggtggctgttgttgtgtcctgtctggatgggctcaaagacaatctgatcctgctatatatttcctccgttgtacttgtgacagcattggagtggtttaccggatttattttggataaactgtttcataataagtggtgggattattcttccatgccactcaatctgaatggatatgtgtgtcttttgttttctttgatctggggtgtggcatgtgtactgatcgtgaagattttacatccgttgatccataaagcactggactttttgccggaatttgtgggctggacatgcattgtgttgtttggggtaactttgtttgtagatttatatgtgacagtgacagatattttgaagatgaatcgaaagctggccaagatgaatgaaattgccacagaacttcatcggatctcagatgagattggggaaaatatttacgaagatgtcacagaggcattggaactgaaagaagagatggcagaccgtctgaaagagcgggcagcagagttccatgagagaagaaaggatctttcagaagatatgcgggagcagatcattgaactgcggaaacattatcgggagctgattttgagaaatccggcgcatatgaagcgaatcatccgggcatttccgaagctggagtctagaaagtacaaagatgcattggaagatcttcgtgagtacattcggaaaaatggaaagaagaaatagaatagaaagagaaagaaggattttgcagatcttcattgagaagattttgcaaaatccttttttgaatgaataggaacggtgttttgctgcgatgctaagagaaattctgcctttttaattttttcatggtagaaatgtaaagaggaacgaggatgatatttgctgcgatccatgctgccggattcgcaaaacagatggcagtgtaaccgaaagcggatgacaagaatgcaacgattgtccgggcaagcatttcaaaaagcccagctcccatagcaatcacactgtgtccaagtccctgcagcgtatttctgaaaatcagcagggaagcaagcggaaagaaagtacagctgttaaagaacagaagcttctggatgcattctgtgatatacggagtcatatcactttgcttcataaagagcagagacatcggcagacagacaagattgatcagaatcatcagcacgatagagcagacgacagagaaaatcatagaaattttcacgccattttgaattcggtcaattttgccggctccgaggttttggccggagtaggtcgcaagtgttgcgccaagagcttcaaacggctgtgtaaagatcatcaagatcttcatagcagcattgactgccacaacggcatcggcgccgagcaggtttactgcactctggaggacaacacttccgattgctgtgatggaaaactgcagtcccattgggattccgatgatcgtggactgacggatggaatggaggtcaatttcccattcttctttctggaatgtgaggatgtcgtacttctttttcagatagacgatgcagagaataccggataatgcctgagaaatcacggttgcgatcgcggttccagaaacgcccatatgaaagatacagacaaaaatcaaatccagaatgacattcataaatgcggaaaccaacaaaaagtacagtggaattttgctgtcgcccagtgcacgagaaatatttgcaggtacattataaagaagcgtggcaggaatcccgagaaaaatgataaagatataagtgtaagcatccttataaatactgtccggtgtctgcatcaagcgtaaaagtgctcctgtagagcaggcgatgacgatagtcagcccaatgccgagcacgatagaaatttgcactgcggcagcgatctttctgcgcatgtccgataatttatttgcaccatagcgttgtgcaacggggatgcagagaccgctgcttaacccgagcacaaatccgataatgagaaagtttaacgaacctgtggaacctactgcggcaaaggcatcctttccgacaaaacggccgacgataatactgtctgccatattatagagctgttgaaatacattcccgatgaaaatcggaaatgcaaaaattaaaatacgttgaaaaatatttccggttgtcagatctttttccataaaaatttcctttctgaatgatatgattggtattgcaagtgatagaatagaacaaagttttcattttgtacatgtaaaataacgcatagttcttgtaaaatagcgatattttagatatccttggaaatagaaaatcatatggagaaaaattgaaaggagcatgatatacatgtatttttgcttgaaaacagatcagattccgaagatatcatacatgaacaaaaccgatatgcaggaaggctggatacattttctgcggacagcagaggaatatattttgtattttgtcagacgtgggacgatgtatttaaaagagggagacagaaagtatgaaatccgagaaggggaatatattttattgcagcctggtatgactcatgttggttacagagaatcagaatgttcctattactatattcattttggggcagaaacgttacaggaactttcctgtacggaagaaggaaaaatcagagaagtattatcagaaaaccgcaagttgttctatcaatgcgatccgcttggatatgaattttatgaaaaatcaaaattgatttttccgaagacaatgcgaatagacagtccggggatccggcagaagatccagaggctgatcgaggaggcaatcgatgcatttgtctatcggaaagaacattttaagttaatttgttcctgcaaattgatcgaggtacttactgaagtgggcgcatactattcgcatacggtattcaatgaaagagaagatgacccgattcaagtgcagcacagagagaaagttcagttgatcctaaattttctatatggcgcttatggacagaagattaccgggaagcggatttcgaatttgtgcagtatgagttttgactatctaaatcgaatgtttaaaaaacagacgggaattacaatttttgagtatctgaaccgaatacggatcaacaaagcaaaggagcttctgctcacaggaacgatgaaatccagtgagattgcggcggcagtcggatattgtgatgaatatcatttcagtaaagcatttaaaaaggctgccggagtatctccgcggaaatacctggagggaaatcatgtcttgacatccgaaaagaaagaaggtatattgtattaaaacaataatacaaataaagtaagagtgacagagagtgcatgggagactagagagaaagggtgggaaagaaagtatgttgcggatcgaacatttttcaaaaagatataaaggtggaaaaaaggcggtggatgatctgaatctttttgtggaggcaggagatatttatggattcatcggacataacggagccgggaaaagtaccacgatcaaatcggtggcaggtgtgctggagtttgaggagggaacgatcacgattgacgggatagacatcaaagagaatccggttgcttgcaaaaagtgtatggcatacattccggacaatccggatctttacgaacatctgacaggaattcagtatctgaactttatcggggatatttttgaggtggaagcgtctgtgagaaaagagcggattcagaggtatggggatcagtttgcattgacgggtgcgctcggagacccggtggcatcctattctcatggaatgaagcagaaactggcaattatctcggcgttgattcatgagccaaagttaatgattttggatgaaccatttgttgggctggatccgaaggcaacgctgcttttgaaaaatacgatgcatgagatgtgtcaaagaggagcggctatttttttctccacccatgtactggatgtggcggagaaactctgcaacaaggttgcgatcatcaaagatggaaaactggttgtttctggagagatggagtcgatcctgaaagatgcatctctcgaacatctctttatggaggtgacggagcatgagaagtaaatgtcttctgttagtgaaaatacagattcagaatctaggtctaaaaaagaagtggggagtaaaacagatctttctggcagctatatatgtgatgcttcttgtgatgttggcgtcttattcttttgggttggcatttggtcttggattccttggaatggaagaactggttcccggatgtgcggtcatactgccggggatcgtgacattctttttctcgatgctgaagacgaacgggatattgtttgcttataaggattatgagatgctgatgtcccttccagtgccgacacggacagtgatcgcgagccgttttctcctcatgtatctgtttcatctggggatgacagcatttgtgcttgtaccgatggggattggctattttctttgggcagagagctctgtcatggcagttctgatatggattaccggaatctttttgattcctctgattccgacaacggcagcgacacttgtaggagccggaattatatttatttcagcgagatttcgccgtgcaaatgcagtgtccacagttcttacagtattgcttactatgtcagtactgattgcctcttttggaagtacagctgtgattccagaggaaggatttacaccagaacagattgggatgatcggtaaagcactgagagacagtatctatcaaatgtatcccccggcgaattggttcttcagaggtgtgacaggggcggggctgatggatttctttctgtttgttgctttgtcagtgggagtgtatctgatttttgttgtgcttgtatcaaaaaattacaaaaaaataaataccgcattgatgacacatcggacaaaggggaattatcaagtagagaaaattacagcaaaacatccggtgacggcgatctgccaaaaggagataaggcggttttttggttctaccatttactgtgtgaatatgggaatcggtgtgctcatgagtctgatgttggcagtggcgtcattctttgtgtcagatgcagatctaaagcggatgctcggagtgcagattccagaacagatgttgaagggaatcctcccactgattcttggggcattgatcatgatgacatgtacgacaagtgtttccctgtccctggaagggaaaaatctgtggattctcaaatcacttccaattacgaaggaagaaatctataaaggaaaaatgttgttcaatttgttgcttcagattccgacaacactgattagttctacacttctcgcagtgcggtttcgtgttacgggaatgacacttatcacactgtttgtctatccggtggcggcagcttttgcggggaccgtgtggggattgtttatcaatttgaagctgccggtttataactggacaaatgagacaaccgtagtcaagcagagtgcagcttccttttttgccttgatttttggaatcattgtgagcattctgtttatgggactcatattttttgtgggagatgtttcggtgggagttcttggagtggcagaagcaggggtgctgttcctgattgcagcgggactttggagttattgcaggagagtggaattttaacactctcctttttgcttgacatttagttttcagggaaataagatagaggaaaggcaatgaatggaaaggatagaaggaaacatgttatataccgtgccgcattattatagaaagtttcagtgtaccgcatctgcgtgtacagacacctgctgtgccggatggcagattatgatcgatgacaagtcacttagaaaatataaaaagataccaggcgcatttggaaaccgtatgaaaaattctgtggactggaaggaaggtgcttttttacaatataagggaaggtgcgcttttttaaatgaggaaaatctgtgtgatctgtacgcggagaagggagagaagatgctttgccggacttgcagaatgtatccccgtcatatcgaggaatatgaggggatccgagaaatctctctttccctctcatgtgtggaagcagcaaagattatacttggcggcaaagaaccggttcgttttttgaacaaagaagatgacagagaagaaacgtatgaatcctttgactttttcttatttacaaaactgatggatgttcgggaggcgatgatcggtattctccaagatcggaaggagtcaatggaagttcggatcgggaaggtgctggcgatcgcccatgatgtacagcgaagaattcgggtagaagctctttttgagatcgatcagctgcttgagcgttatcaaaaggagaagaatcgtgagaggttcagagaaaaattagagaaaattagaccaaaaagcagatcacgttatgagataatgagtcagatgttccaagtctttggaaaactggaagtgttaaaggcggattggaagccttatatagaatctgtggagcagaagctgtttggaaaaggtgaggcattttatcaggaagcatttgcgcggtttgaaagagaagtttgcaaagaagagcgctgggaaatttacctggaacagctgatggtatattttctcttcacatatttctgcggagctgtttatgatgagatggcatacgagaaggcgaaattcgcagtcgccagcacactgttgattcaggagatggtgtttgcctccttcctttcacatgggaaatttccacaggtggaagaggtggcagagattgcacacaggtatgccaaggaagtggagcactcagatacgaatttaaaacggttggaagaactttttcagaaagaaaaatcgttccatctattatcgcttctggcggtagtatagatcgagaagtaaagcagaataaaaaaggggttagaagtaaatggcgacattgacaaaggagatgaagattttttcctatcagacaagtccggttgtgggttgggaaggagagtacggtggattttctctggaactttttggaaatggaaatctgagatattgtacttataaattgtttgatgatattcagctgatgcagatgtttaaggtggatcgagatactgtatacggaatttatgaactgatccaggagacgaaagaagaaattggggagataccgaggaatcttgataatggttctcatgaaggatggatcaatgagtttcattttattgggcaggaaaagatcgtggctcgaaatattaagacatcactgccgaaacttacgatgttcacaaagcgtttttattacgaaaaatatagggagaacatggcaaatgagaacagtgtgttgcggatctttcatgaaatttgccgtctgttgcgtacccagggggtgcgtctgtctctgggacagtgcaaaattgatcaagattttaagctgaaggtgacatggtaagaaagtgaaaagcaggacatacaaaggaggagaggcgtatgaaacggattcgcagaatactggtagggatgcttctgatcattgtctgtgcagggggatttgttgccgggaagggatatcggatgtatcaggaggcgctggaagagaagagtcttgtgcagatccggaaggaaacagtggaagatgaaaatttcgtatcggcagagcagctcccggatatttacaagaaagcagttgtgtcagtggaagataaacggttttacagacataaaggaattgatcctattggaattgcgcgggcattctatcacaatatccgtgcgagaaagcttttggagggaggaagcacgattactcagcaggtggcaaaaaatttctattttgacatggatcaaacagttgagcggaagattgccgagatatttatggcaattgcgatggaaaaagaatttacaaaagaggagattttagaactatatgtaaatcatatttattttggggatggatatgactgtgtaagagaggcaagtcttggatattttcaaaaagaacccggacagatgaatgactatgagagtacgttgctggcgggaatcccaaatgcaccatcggtctatgcgccgactaaaaatccggaactcgccaaacagagacagcagcaagtgttagagacgatggtaaaaaatgagatgctcacggaggaagagcaaaaggagattctgacgcaggcagaatagagaaaagagtttgcagaaaagggattgacaattaaatactacaaatgtaatataaaagaaaggaaagcggagcgctttcttatctttttacggcaaaatattacaagtgtaagaataataaccgtatagggtcaaaggagctggtagcggtggtttgttctgaaaagacggaggcaaaagaaaggggagataggaatggagacaggacaaggaaaagagagaaagaagcggtgtgtgtgcaagtgtgttttactgtttttgacaatacttctgctgtctgcctgcgtgcagggatgtgatcgcacagatgagaaggcaaaagtagaagtgtccggggagattccgaaatcagagcaggagatcctgcttgcggaagcggaaacagcggcaaaagattatcagaagatttataaggaaaagccggagatttctttgaaagagatggtagaaaaaatggggaaacgggggtatattataatagatgaaaataatcagaccaatttgcagaatccgaagaagctaagaaagttctgcgaagagatagcatccggcagagagggaaccgtacggttttaccgggcgctggaaagaaacggaatccggcagaccgatctgacttttgatggaacaaacctgatcataacgaatgttgtcctaagcagagagaaagaagatcagtttatctcgtatatggagcgttatgcagcaaaggagtggaaggtaaccgagaaaggatatttaatctataagaaatatcgtccggcaggttatgatggagaggatgcagtcgatgcagttcggatggaaccgattccggatgagttaagagaattgtgtaaacgttatgttccacaaagtgggtactacaacggaggattattttttgaggagtggaatgagaagaattatgacagactggattttcggtcgttgtttgaagagttttaccggatacagaatggaaattatccggcagatgacgtatattcggaggggattccggcgcaggaatttgagtcggtagtgcagagttacctttcggttccggtagaaattcttcggggaaggcaggagtatcagaaagaaaagaactgttataaacgggaagaaatgttgtatcgaagatataatattacaaatgtgccggtgccggaggtgacggcttataaggaaaatccagatggaacattgaccataacggtggaggcggtctggaaagaacggatgacagattgtgcgttcgtacatgaagtgaccgtaaggcaacgaggggagagaagtttccagtatattggaaataggattattcagtcggaggagaatatgcttccaacttatatggaagaggctgagaaaaagtagaagggagtattcatgtcagagaagagaacacaaaataagggtacaaaaaaacaacaagagatacagaattacagaaggaaagagaaaagcttcaattgggtgtggctcggggtttctgtacttttggttattggagtgatcgcaaccggggtgatgttgaatgttgcagacatccgacagactccgaagatggttatgaaagaatattttgaattactttccaaaggaaagtatgaagagatgtatgcgtttgtcagtgacacaagcggaatagaaaagaaagctttccttgagaaaaacaaaaatatttatgaagggatccagatgagtggacttcaagtgaagtttgacaaggagaagaaaaagaaggacaaagagaagacagccgtagtatcttatcagacgaagatggaaactgtggcaggagaaaaagcattttacaatgaagcaagtctggtcaaagaaaaaggcggtgactggaaacttgtatgggaaccgtcattgattttcccggaattgaggaaagatgacagaattgtcgtgtccacggtttcggcacgcaggggaaatatattggatcggaatggaaatgggcttgcagtcaatggaactgtacttcaagtcggtgtggtcccgggaaagatggatgaggataagacgggagcaattgaaaaaattgcagcagaaatggatatgacagaggaagagatagaaacaaagctcagcgctgcgtgggtgacagatgacgtgtttgtgccattaaagtcgatggcaaaagggaatgaagaaaaagaacagcgtctgctggaaatcaaaggagttatgatctctgagacggaaggaagagtctatcctcttggagcagcaggaggacatctgactggctatgtgcagccgatcagtgcagaggaactggaagaaaaacagtcggaagggtatcatgaaaatagtgtgattggaaaatcaggtttggaacttgcctatgagaaaacactaaagggttccgatggctatgaaatctacacagcagatcagaatggcaagacaaagattcttttagctgcgaaggaaaaagaagatggacaagatgtgacggtgactatcgatgctgcaatccaacagaaagcgtacgaacagtttcaaggagatgctgcgatggctgtttccataaatccaaaaaccggggaagtgatggcacttgtgagtacgccggcatatgacccgaatgagtttgtctatggaatttccgatcggagatggacagaattaaatgaagatccaaaccgaccgcttttgaaccgattctatgcggctcttgtgccaggatctacgtttaaaccgatcacggcagcaattggcatggatgcagggaagcttgatccaaatgaaaacaaaggatatgtgggactaagctggcagaaagatgcaagttggggagaatatatggttacaacactgaccgattatggaagcgaggtcaacttgcagaatgcgcttgtctattcggataatatttactttgcacgtgcagcgcttgatattggggcggatacgatgatcgagggcatgcgccaggcaggatttgaagaagaactgccatttgacatcggtgcacaagtatctacatttggaacagacagtaagatttcttctgaaattcagctggcagatacaggatatgggcagggagaattacttgtcaatccaattcatcttgcgtccatttactctgcatttgtcaatgagggaaatatgattcttccggtactacagatggaggaaggacagcaagcagagtattggaaaaaagatgtatttacgaaggagacggcaaaacagattcagagtgatcttgtgcaggttattgagaatccgactggaactggagcaggcggaagaatcgagggagtttccttgcttggaaagaccggaacagccgagacaaaaggaagtcaggaggatgcaggagctcttgaatatggatggtttgcatgtgaaacgacagagggggaagagcggccgctgtctgtaatcggaatggtagaagatgtacagaaaaaaggtggaagtaattatgttgtgtcaaaagtcaatgccatcatggagtcgtattatgcaaattgatcaaaaagagcatgattttttgtgaatttccataattttataaaaaatattgacagatactgtcgacagttttataataaaaacagcgttaaataagaaaaagaaggaggtaaaactatgaacgcaaagagaacaataaattcaatggattgtacaacaatatacagcaaccgtttggaacgtttacctcaggagaatcttttttagagtaaagtaagaatagaaagatagtgctttctttttgtgcaaaagctgtggtatgcgtgccacagctttcttttttcaggaatttcctggaaaagaagcgtttctgggtggatatctttggagagatatctgttctgggagaatcttgcagaaaacatagaagaagcacatcttatagaggaagtttgatccgcaatagggaaaatcaggatgtgcaccaggcatgtcctttttttgtgggaaatttcatcttttaatcaaaattttcagtagattcctggcggagcacagaagtgtggcgctttggaagagaaaaagattcttaggagcgaaaaaggtctgttgtataagagaggaaaggagaacggggaaacttatgaaaaaaatatcaaaatatctgttggaaaagtggtatgtgtatgcgtttgcaatcggctgcttggtcatcaaggtcagtcttgacatgctgtctccacagattacaaagcgtatgattgatgatgtgattggaaagggacagaaggaaatttttccaatgctactttttggggtctttttcatcggagtaggaagatgtgtttttggatatcttcaagaatttacttttgaccgggtgggatcggagatcgcgatggatattagaagaaggctgtttgatcatatccagtcgttgtccatgcggtattttaacaatacaaatactggagaactgatgtcgagggtcaaagatgatgtagataaaatatggggatcactgacttatatcagcatgttgctcgtagaagtcatctttcataccagtgtgattttggtttgtatgtatcgccttgacagaggtttgtttcttattccggtgatcgcaatgccaatggtagcgctgtttgcaattatgatggaaaagaagcttggaaatgtgtatgaggagattagtgaagaaaatgctgctctgaatacggtggcggaagaaaatcttgccggagtgcgtaccgtcaaagcatttgcaagggagaaatttgagatcagaaaatttttatctcacaacaagcgttattacgaactgaatatgaagcagtctaaagtgctggttcgataccagccattatttcaggcaatcacaaagctgcttccagttattgttattatttttggcggacaccgtgtgatcgagggaaaaatcacactgggaacgctcggggcatttgtggaatattcaatgaacatcgtctggccgatggagatgctaggatggctgttcaatgactttgcggcggcagttgcatccaatgaaaagctgaagaagatttaccgacaatatccggaaattacagagcctaagagcccggaaagactggagaatgtaaaggggaatatcacatttgaacatgtttctttggaacttgacggacattccattttgcgagacatatcctttgatctgccggcaggaaagacgctcgggattatgggagaaaccggtgcgggaaagacttctgtcatccatgtacttcagcggttttatgatgtcacgggaggaaaggtccttttggatgggaaggatattcgaaaactcccacttcatcagttgagaagaagcattgcgcttgttatgcaggatgtcttcttgttttcagatacggtggaagaaaatgtacggtttggaaagcggggagaagttttgcgggaagaggtggttgcctctcttgattgtgcggaggcaaaaaatttcgtagagcgtatggaaagcaggtatgacacgctgatcggtgagcgcggggtagggctttccggtggtcagaaacagagaatcagcattgcccgggcgattgcaaaacgtgcgccgatcctcgtattagatgattcgacttctgcactcgatatggataccgagcgtcaaatccaagagaacctacggaatgtgacagatgtgacaaagattatcatcggacaccgggtttcttcagtgcgagatgcagatgaaattctgattttacaagatggaaaagtggcagagcggggaacgcatgaaacattatgggagaaaaagggaatttattatcagacctgtcagatacagggggaagttatttaaaggaaggagagaaaaacgatggcggtaaatgcaacgagaacagatgagcagatccagacagtgtcaaagagaaagactctggcgcggatgttctattatctgctcgcatataaaaagcaggtcgtggcagtgctgacgattatgcttgtatcagttgtgatcacactgatcaatccgctgatcatccaacaggcgatcgacgtttatattgcaggagaagactggcatgggctaaaaaggcttggcattgtggcagttcttttgaacctgacacttgtcctgcttgtgaaaatacgtatgtatattatggcgaaggtgtcaaatgaggtgcttctcacaatccgtgaagaattgtatacgcatatccagacactgagttttcaattttttgacagcagaccgaccgggaagattcttgcaaggatcattggggatgtcaattctttgaaggaggtgctgtcaaacagtgtcacgacactgattccggattttatcacaatcttgtcggtggtcgggatcatgtttgtcaaaaactggaagctggcagcggcagcgctctccagtttgccgcttatgatcctcggagttgcctttgtgcagagcaaatctcatatacggtggcagatccaccgaaaaaaaggatcgaatatgaatgcatttgtccatgaagatatttcagggatgtatgttgtgcagagcttcggggcggagcaggaaacgaaacagatttttgaagaattattacaggagcataaggactcctttgtagatgcagtgcgctatgcagatgcgtttggtccaattgtggatttctgttggggacttggaacaatggtactatactttttcggggtcaatatgattcttgacggaatgctgcaggtcggaacgctgatcgcatttggaacatacatttcaatgttctggcgaccggtcatgaacctcagtaatttctataatcagcttgtgacgaatattgcaggagcagagcgtatttttgagattcttgacacgaagccggacctgactgacagggagacagcttgcgagatgccggagatcacaggtgctgtcagctttcggcatgtaaccttttcctatgagaaagaaaaggaagtattaaaggatgtcagctttgagattgagcctggtcagacagtggcgctgatcggaccgaccggagcaggaaaatcaacgattgtcaatctaatctgccgcttttatgatattcagcacgggcaggtctgtattgatggcagggatgtaaagagtgtgacgattgaaagtcttagaagtcagatgggaattatgacacaagatgtcttcttgttttcgggaacgattcgggaaaatatccgatatggaaggttagaagccagtgaggaagaaatcatccgggcagcaaaagcagtccatgcccatgaattcatcatgaagatggagaagggatatgatacagagttaaaagagcgcggcgcaggactttcagcgggacaaagacagcttctcgcatttgcaagaacgatgctgtcagaacctaaaatactcatactggatgaggcgacatctagtattgacacacatacagaacttcttgtacagaaaggaattgaagcgttattaaagggaagaacctctttcgtgatcgcacaccggttatcgacgatccaaaatgccgatcgcattttcagggtagacaatggcggaattttggagttaaatagttttgaggaaattgaaaagtgatgtctgtttcaaggaagtgagacggcggacaggaaaatgagcatgtaaggaggaaaaagatgaagcatgatacatcgcagatgattaaaagagaggagcatctcccggtcattttgatcggagaggggctgcttgtcgggatgattggcggtctgatcgtccttgcctaccgcattgcattgaagtatgccgggaagtggatggatgagatcatcacctttgcgggacagtctccggtgcggatggcagggtggctgcttgtcttaatggtgttggcagttcttgtaggattgcttgtccggtgggaaccgatgatctcagggagcgggatcccacagctggaaggagagatggcgggaaaattatcgcagaaatggtggcgtgtgctgccggcaaaatttgcaggaggatttttgtcactgctggcgggattatcgcttggaagggaaggcccgtcgatccagcttggagcaatgacgggaaaagggatttcaaaactgttaaagcgggatcggacggaagaaaagtttctgttgacctgtggggcgagcgccgggctgtcggcggcatttcatgcgcctcttgcgggggtgatgttctcacttgaagaagtgcataaaaatttctcggtatctgtgctgatttcggtgatgaccgcatcgattactgcagattatatttcttctcagtttatcgggatagaaccggtatttcagtttgatatcggaaatgtacttccacagaattattattggatgatcgttgtgcttggagtgattcttggatgcttcggtgcattttacaactggtttacgctgacggtgcaggcaatgtataaaaaagtctcatggttaaatgaagtgacacgactgctgattccatttacgcttgccggaatttttgcatttacagcgccggaattacttggaagcggacatgaactgatcgatctgatgacagatcataagctattgctagggggagcaatctttttgctcgcagcgaaatttgtgttctcggcagtctgtttcggttccggggcgccgggagggattttctttccactgcttgtgcttggagcattgactgggggaatctttggaatgatcggtgtcaattactttggaatggacccggattatatcaataattttgtcttacttgcaatggcaggctatttcaccgcgatcgtgcgtgcgccgctgaccggaatcatcctgatctttgagatgactgggtcagtgagccagatgctgtcactctcgatcatctcgatcgtggcatatattgtggcgacgttattaaagtctgatccgatctacgaaagccttctggaacgcctgctcgcgggcagaggagaactgaaagaagaaggaagcagggagaaagtactgatgcggcagtctgtgatgtttggttcagcggcagcggatcatgaggttggagaaatccagtggccggatcactgcctgcttgtgtcgattcaaagaagcggaagagagattattccgagaggaaacacaatgatcagagcaggagatgttcttgtgacgatgacagaagaacaatatgcgggagagatgcatgatgaagttcgggagatctgtgaagagtagcaacagcttcaaaatagtgtagaagaaacttcctttttatgttatgataaattgataggtctaaaaatagattttggaagaccttgcagagcaaacaaaagaagaggaagaaaacaatgggaatcatagaattatttttgatcgcggtaggtctttccatggatgcgtttgcagtgtcagtctgcaaaggattggcgatgaagaaatgtacatggacaaaggctggcattgtcggactttattttggtatatttcaggcgggaatgccgcttttgggatatgcattgggtgtgcagttcagccatgtgatcacttcgatcgatcactggattgcatttgtacttcttgggatcatcggtctgaacatgatcaaagaatcgcgggaagacggcgaagagtgcgggatggaagaagattctcttaaggtgaaggagatgcttgtgcttgcggttgcgaccagcattgatgcactagcagttgggatcacatttgcattcttgcaggtggacatcattccggcagttgcatttatcggagtgacaacatttttactgtccgtaggcggggtgaagattgggaatgtatttggtgcaaaatataagtccaaagcggaattggcaggaggattgatcctgattttaatgggaataaagattcttctggagcacctggggattttctaatacagtaaagtaaaaataggcagagcagagaagataagaaatctgttattgggagaagatgcagattagatttttaaagaggtgaatgattatgagatggaacaaattcagattaaagacaacaacagaggcggaagaccttgtcagcagtatgttgatggatctgggaattgaaggtgtggagattgaggataaagtgccgcttacacaggctgataaagagcagatgtttgtagacatcctgccgcagatcgagagtgatgatggaattgcttacctcagcttctatcttgaggaggatgtggataaagaggagatgcttgcaaaggtcagaaatgagtttgaagcgatgcgtgcctatgcgaatgtaggagaagggacgatcgaagagtctcagacagaagatctggattgggtaaataactggaagcagtattttcatcagttctatgtcgatgacattttaattattccatcctgggaagaggtaaaaccggaagatgaggataagatgatcattcatatcgatccgggaacagcatttggaacaggaatgcacgagacgacacagctttgtattcgccagctgaagaaacatgtgacaaaggagacaagaattcttgatgtaggatgtggaagcggaattcttggcatgcttgccttaaaatttggcgcagcttattctgtgggaacagatcttgatccgtgtgcaatcgatgctacttatgaaaacatggaagtcaatggaattactagagaccagtatgaagtcatgattggcaatattattgatgataaggaagtgcaggataaagtcggctatgataaatatgacattgttgtggcaaatattcttgcggacgttcttgtgccactgacaccagtgatcttaaaccagctgaaaaaaggtggtgtctatattacaagcggaatcatcgatgacaaggaagatactgttgtagaggcagtgaaggcagcggggctggaagtgctggaagtgacctatcaaggagagtgggtatctgttaccgcaagaaaaaatttctaagaaagaggatagaagaacatgcagcatttttttgtagtgccagatcaagtgagggatggatacattgagattaccgggtcggacgtcaatcatatgaagaatgtacttcgtatgaagacgggagagcagttggaaatcagtgatggcaacaataagaagtatctctgtgagatcgaatcactggaggcagacaaggtaacggctcggattttggaggaacgggaagcggaaaatgaacttccatcaaaactttatctgtttcaggggctcccaaagagcgataagatggagttgatcatccagaaagcggtagaacttggggcatgggaagtgattccggttgcgacaaagagggcagtggtaaagctggatcagaaaaaggcggcaaagaagagagaacggtggagcgggatctcagagagcgctgcaaaacaggctgggagaaatgtgatcccggaaataaaacaagtgatgaactttcaggaagcgctttcttatgcgaaaagccttgatgttcttctgatcccatatgaattggcggagggaatgcaggctacaaaagagcggatccaagcgatacagccggggcagtcggttgggatttttattggtccggaaggcggatttgagcaagaagaggtgaagcttgccatggaggcaggagcatatccgatcacgcttggaaggcggattcttcgcacagagacggcggggatgacgatgttgtctgtgctgatgtatcatctggaacaggaatgacataatctgatagtaaaagaaaacaggagaaaactatggaaatatatctggacaattcggcgacaacaaagtgttatgaatgtgtgcgggacattgttggaaaagtaatgtgtgaagattacggaaatccatcttctatgcacagaaaaggagtcgaggcagaacaatatatcaaggaagcaaaggaaatcattgcaaaggcgatgaaagtgcaggaaaaagaaatcttttttacttccggaggaactgagagcgataaccttgcgctgatcggtgctgcaagggcaaatcatcgggcagggagacatctgatcacttcgtccatcgagcatccggcaattttaaatacgatgcattatcttgaagaagaaggatttcgcgtgacgtatcttccggtggatgcagaaggaaaggtgaagctttccgcactgcaggaagcgctctgtgaggagacaatcctcgtatcgatcatgtatgtgaataatgagatgggagcggttcaaccaattgaggaagcagcgcgtatcattaaggggtacaacaataaaattttatttcatgtggatgcagttcaaggatttggaaaatatcggatttatccaaagcggatcggggttgatatgatgtctgtgagcggacataaaatccacggaccgaaaggaatcggagcgctttatatcaacgagaaggtgaagatccatccgattattttcggaggagaacagcagaaaaatattcgttccggcacggagaatgttccggggattgctggacttggaagagccgtcaaagagatttatacggatttggatgaaaaaaccgcaaagatgcgtgcgctaaaaaatcggttcattgaaggaatccagaaaatcgatgatgtagtaatccatggagtgacagatgagacgagtgcgccgcatattatcagtgtcggtgtagctggaatccgaagtgaagtgctgcttcatacgttggaagacaaaggaatctatgtgtcctctggttctgcctgtgcatcaaatcatccggcaatcagcggtgtgctgaaaggaattggtgtgaagaaagaatacctcgatgcgacgcttcgattcagtctttccgaatttacaaccgaagaggaaattgactatacactggaaacattatataattgtgtaccgatgctgagaaggtatacaagacattgatataatatgcaaaagaaaggataagaaaaatgatatttcatgcatttttgataaaatacggagaaatcgggatcaaagggaaaaacagatatctttttgaggatgccttgatccgtcagatgcgctatgcgctgaaagatgtggatggaacttttgatatccacaaatctcaggggagaatctatgtagaatgtgaaggagagtatgactacgaggagactgtcgcaagtttaaagagagtttttggaatcgtgggaatctgtccggtagtccatgtggaagaccagggatttgaacaattaaaaaaagatgttgtagattatatggatcagatgtatccagataaaaatacaacatttaaagtagaggcaagaagaggcaagaagagttatccgaagaattctatggagatcaactgcgatcttggagaggctattttagaggcatttccagaaatcaaggtagatgtgcacaagccagagatcaagcttaatatcgaaatccgcgaacagatctacatttattcagaaatcattccgggaccaggtggaatgccggtgggaacaaacggaaaagcgatgcttctgctctccggtgggattgacagcccggtagcaggttatatgatttccaagagaggagtcgggctggaggcaacttatttccatgcaccaccgtatacaagtgagcgtgcaaaacagaaagtaatcgatcttgcgaaattagtggcaaagtattcaggaccgattaagctgcacattgtcaactttacagacattcagctgtatatttatgataagtgtccgcatgatgagctgacgattattatgcgtcgttatatgatgaagattgcagaacattttgcaaaagagagcggatgccttgggttgatcacaggggagagtatcggacaggtggcgagccagacgatgcagagtctggcagcaaccaatgatgtatgtacactgccggtataccgtccggtgattggatttgacaagcaggaaatcgtggagattgcagagaaaatcgatacttacgagacgtctattcttccgtttgaggattgttgtacgatctttgtcgcaaaacatccggtgacaaaaccgaatatcaatgtgatccgcagatcagaagaaaatcttgcagaaaagattgatgaactgtttgaggcagctgtgaacactgtggagacgattgttgtaaaatagtaaaaaaatagatatgttcctgaccggagccggccggaacatatctatattttcttacagacattccggagaatatctgtatacttctttatcaaagtcgtaggtgactgttgaaaacttatactaagtatggagcaagcgcttctaaaatagtatcaaggtctttttcagcgtggatgtttaagtcgatcggttttgataagtctaagctgaaaatacccatgatagattttgcgtcaatcacatatcttccggatactaagtcgaaatcgtgatcaaattttgtgatttcgtttacgaaagattttactttgtcgattgaatttaatgaaatttgtactgttttcattgaataatcctccttgaattttgttctacccttatcttaaagtttgggggtataaaagtcaagaaacaaagtgccaaagaaatggagaaattttcgtgattttggataacaattacatagaagcagaaaaagaaagggaaaaaagatgaaaaaagcagcattacataatcttggatgtaaagtcaatgcatacgagacagaggcgatgcaggaactgttggagcagaatggctatgagattgttccgtttcaggaaggggcggatatctatattatcaacacatgtacggtgaccaatatggctgacagaaagtcaagacagatgatccatcgggcaaaaaagatgaatccagatgcaatcgttgtggcggcgggatgttatgtgcaggcgcaggaaaacagcgataagatcgatgaatgtattgatattgtcatcggaaataataagaagcagaatttgatcgagattcttgaggagtatgagcagaaacgaaaagaagcagacggtgtgtttgtgcagcaggaagtcattgatatcaatcacacgaaagaatacgaagaactccatctgaccaagactgcagaacacacacgggcatatattaaagtacaggacggctgtaaccagttttgtacatactgcatcatcccatacatgagaggtcgtgtcagaagcagaagaaaagaagaagttgtggaagaagtgagtgcacttgcggccaatggctataaggaagttgtgctcacaggaattcatctgagttcttacggagttgactttgaagaaaaggaaacgttactttcgctgatccaggcggttcatgcaatcgaaggaatcgagagaatccgactcggatcgttggaaccccgcattatcacagaagaatttgcgtcggcgctgtctgcacttccaaaaatctgtccgcattttcatctgtcattgcaaagtggctgcgaggagactttaaagcggatgaaccgaagatattcagcagaagaatattttgaaaaatgcatgctgctccgtaaatattttgaaaatccggcattgactacagacataatcgtcggattcccgggagagaccgaagaagaatttgaagagtcaagggcatttgtagaaaaagtaaatttttatgagacgcatatttttaaatattcaaagcgtcagggaacaaaggctgcggtaatgccgaatcaagtgccggagccggagaagacaaaaaggagtaacacgttacttgcattggatgaacggaaccggaaagcttatgaggagcaattttcgggcaaagagacagaaattcttgtagaggaacagatggagaaagacggaaagacatattggatcggacatacgaaggaatatatccggctggcaatcttgtctgatgaaaacttatctggcaggttactaaaagtgactgtcggaaaagatgcatggacagtggatgcattgtaaaagtagaaaactttattttgagaatcattttaaaaatccttcacaaaatattcattgtatttttggtacatttatattagaatagaaatgtatgaaacggaggaagaaaagatgaaagatttgagcaatacacagttctttcacgtggagaccggaccacagatcaaggcgaaagacattcttgagatcgtgtatggggcactgaaagaaaaaggatacaacccggtaaatcagatcgtagggtatattatgtcaggagatccgacttacatcacaagtcacaatggcgcgagaagtctgatcatgaagatggagcgggacgagcttgtagaggagatgctgaaagcgtatatcgagcatcacggatgggaataatatcgtatgaggattatgggactggattatgggtctaagacggtgggggtcgcaatcagtgaccctttaggtcttactgcccagggaattgaaacaatctgcaggaaggaagagaacaagctaagaaagacactggctcgtattgaggcacttgcgcaggaataccaggtcgaggagattgttcttggcttcccaaagaatatgaacaacactgtcggtgaccgggcagagaagtcgctggaattcaaggagatgcttgagcggagaacggcacttccggttacgatgtgggatgagcgcctgacaaccgtcgaggcagaacggacattgatcgaaaataacgtacgaagagaagaccgcaagaaatatgtagataagatcgcggcagtttttatcttgcagggatatctggattctgtttatttcagacagaagtcagacgaggatatggaagaagtgtaggagtttttatggaaaagattacatttacatttgaaggagaagatcaggcagtagaattttttgtgttagaacagacaaaattaggcggtgtgacatatattcttgttacagattctgaagaagatgatgcagaatgtctgatcttgaaggatttaagtaaagtagaagaggatgaaagtgtatatgaagttgtggaagatgatacagaacttcttgcagtttcaaaagtatttgaagaattattagaagacgttgatattgaaatgtagttagatacatttgagtatagaactttgcagatgaggtggcatatgacattaaaccaggaagcgtttaagaaaatattaaaagagcagggactgaaagtgacaaaccagagactgcttgtacttgaggtgcttgaaaaacatcgtggtgagcatatgacagcggaggacatttatgaactggtgaaagtcgactatcctgaaattggattggcgaccgtataccggacggtacagttgttactggaattgcaattggtggatcggattaatctggatgatggatgtgtcagatatgaaatcggaaccctgatcgaaggcggggaaggaaagcatcatcatcatcatttgatatgtaaaagttgtggaaaagtatggtcttttgaagatgatctcttagaggagctggaaagttatattgagaggaaaacggatttccatgttctggaccacgagttgaaattctacggacaatgtaaagaatgtgcagaaagagaaagtgcagagaaaagaaagtagaatgaaacatggaggtgtagcttttgaaaagagagagcaattcaaaattaaagatcattccgctcggaggacttgagcagatcggaatgaacattactgcctttgaatatgaggacagtattattgtagtagactgtggactggcattcccggaggatgatatgctaggaatcgaccttgtgattccggatatcacttatttgaaggataatatccaaaaggtgaaaggatttgtcattacccacggacatgaggatcacatcggagcattatcttatgtattaaaagagatgaatcttccaatctatgcgacaaagcttacgatggggatcattgaaaataaattaaaggagcacaacctgctccgctgtacaagaagaaaggttgtacgtcacggacagtcgatcaatctggggcagttccggattgaattcattaagacaaatcacagtatcgcagatgcttctgcgcttgcaatttattcgccggcaggaatcgttgtgcatacaggtgactttaaagtcgattacactccggtatttggagatgcgatcgatcttcagagatttgctgagatcggaaagaaaggtgtgcttgcgctgatgtcagacagtacaaatgcagagcgcccgggatttacgatgtcagagcggacagttggaaagacctttgaccagatttttgcagaacatagaaatacaaggattattattgctactttcgcatcgaatgtagaccgtgtacagcagatcattaactctgcctataagtatgacagaaaagttgtcgtggaaggacggagcatggtcaacattatttccacagcatcagagcttgggtatctgaatgtgccggacaagacattgatcgagatcgatcagctgaagaattatccggatgagaagacggttctgatcacaacaggaagccagggagagtctatggcggcattatcccgtatggcagcagatattcataagaaggtcagcatcaagccgggagatacagttattttcagttcaaacccaatcccgggaaatgaaaaggcagtgtcaagggtgatcaatgaactttcccagaagggtgcagatgttattttccaggatgcacacgtatccgggcatgcctgtcaggaagagttgaaattgatctattctcttgtgaaacccaaatatgcgatcccggttcatggagaatatcgtcatttgaaggcaaatgcaggaattgcgacagcgcttggaattccgaaagaaaatgtattcatcctcaaatccggagaggtactggcgctggataatcaaagtgcaaaggttgtagacaaagtacagacgggagcaatccttgtagacggactcggtgttggtgatgttggaaatattgtattacgtgatcgtcagcatttggcagaagatggtatactgatcgtagtcctgacactggagaagggaaccaatcagctccttgcaggaccagacattgtttcgagaggatttgtctatgtaagggagtccgaagggctgatggaagaggcaagacaggtactttccgatgcgcttgagaactgtttgagaaacaatcgcaatgcagactggagcagaattaaattagtgatccgcgatacgatgaatgattttatctggaagcggactaagagacgtccgatgatccttccgatcattatggatgtatagaaggaaagaagggcggaggattttggttctccgccttattttctgaggttttgcaattcagaaacagaggagaaggcatatgattgtagatgaaagaatggtgacgttcattaattctcttgacacagaaaacacagcgattttggagcagatcgagcaggaggcgctggatacttatgtaccgatcatccggaaggagatgcagagctttctgaaagtactgcttgcgatgcagaaaccgaagcggattttagaagttggaacagctgtcggattttctgcaattctgatgagtgaatatgtgacagaggaatgtgagatcacaacaattgaaaaatatgagaaacggattccgattgcccgtgaaaattttaggcgggcaggaaaagaaaaacagatcacacttctggaaggagatgcgatggaagtgatgcagtccttaaaagagccgtatgattttatttttatggatgcggcaaaaggacagtatatttattatctgccggaagtgatgcgtcttttgaatccgggaggcgtcctcgtatcggacaatgtgcttcaggaaggagatatcattgaatctcgcttcgcagtggagcgcaggaatcggacgatccacagccgaatgagggaatatctgtatgcattaaagcatgatgacagactgctgacgtctatagttccgatcggggacggagcaacagtcagtgtaaagattggagaaaaatagaaaagaaacaagttgtacagaaaggaaaaatatatggcaagacatccagaattattgattccggcgagtagcctggaagtattaaagacagccgttatgtttggagctgatgcggtttacattggaggagaagcattcggacttcgagcgaaagcgaaaaacttttccatggaggaaatgaaggagggaatcgcatttgcacatgaacacgatgtaaaagtatatgtaactgccaatattctcgcacataatgaggatctttcaggggtacgagaatattttaaagagttaaaagagattaaaccagacgcattgatcattgccgatcctggtgtatttgagattgcaaaggaaatctgtccggagattgagcgtcacatcagtacgcaggcaaataatacaaactatgcgacttataatttctggcataagctgggggcatctcgtgtcgtatcagcaagggaattgtctctggaggaaattagagagattcgggcaaatattccggatgagctggaaattgagacatttgtccatggggcgatgtgcatttcttattccggaagatgcctgctcagcaactatttcaccggaagagatgcaaaccggggagcatgtacccatccatgcagatggaaatattctgtggttgaggagaccagaccaggagaatatatgccggtatatgaaaatgagagaggaacttatatttttaactccaaggacctctgtatgatccagcatatcccggaaattttagaatcgggcattgacagtctgaagatcgagggacgtatgaagaccgcactctatgtagcaacggttgcaagaacataccgcaaggcgattgacgactatcagaaggatccggcactctatgagaaaaatatgccatggtatctggaacagatctctaattgtacttatcggcagtttacgacaggatttttctttggaaagccggatgagacaacacagatctatgacagcaatacttatgtgaaagagtatacctatcttggaatcgtaggggaagagcgtgatggcacttaccgtatcgaacagagaaataagttttctgtcggagagacgatcgaagtgatgaaaccgaatggcgaaaatattagtgtggaagtgaagaggatcttagatgaggatggaaatgagcaggagagtgctccgcatccaaaacaagtattgtatgtagatctgggaatgccgttagagcagtatgatattttaagaagacaggaagcgaaagaagtataatgtgatgaggaaaccgaaagcggcaagcattttcagtgaaaatgagcctttgctttcggtttcttagtattctgtcaagattccggaaagaagctgcgcaatttttccacggcgcttttttcaatgcgtgatacataagagcgggaaattccaagcctttttgcgatttcacgctgcgtgtattcttcctcattgtaaagtccgtagcgcattttcagaacgagccgttcccggtcagataattcggattctactttttcgtataaagtgcgtacatcgtctttgagattgattttctcgtggatatcttcatctgttgtctccatgacatcaaacagctggatctcattaccttcccggtcagtaccgatcggttcgtagagagagatttcccgggaggatttttttctagagcgaagcatcatcagaatttcattttcaatacagcgggctgcataagtggaaagtcgatttcctttttcgggattaaaggtgatgactgctttgatcagtcctacggttccgatggagatcagatcttcattgtcttcctccggacgttgatattttttgacaatatgtgctacaagccggagattgtgttcgatcaggatgtgttttgcttcaaggtcgccctctgtgtatttttgcatgtaatattgttcctcagcagaagtgaggggagttggaaatgatttcaagataagcacctctaagcatatttaatatagcttatgtgctggagagaagatttgtgcttttccacatgaaaacagagaaaaaagcatcaaaatgtctgtttactatcaaaggagaacgtgctatcatatacttatgtctgacaaagtgaagggcggcagctgccgcaaaaattatatgaatggcgggattgtatgggcagattatttgacacagacaatattgtctggagatttttaggaagggtagccgatttggtcatcctcaattttttattccttttatgcagcattccgatcgtaacgatcggtgcttcgtggacggcgctgtattctgtaacattgaaggcggtaaagaacgaagaaagttatattgccaaaggatttctaaaaggatttaaagagaatttcaaacagagtacgatcgcatggttagtgatacttttagttggaacagtgctttttgtagacatcaggtttgcgatgggactggaaggcggatttggaaaagcatttggggtgaccatttatgcaatgtcttttgtttatctgatgattgcaatgtatattttcccttatattgcacgatttcacgcgacaatgaagcagattttcaaaaatgctctgttgatcggtatcggcagttttccgttcacattacttctttttggagtcaatattttagtactgtttgtgacgtttttcagtgcacgggcaatgatcacagcacttgcattctggttcatgactggattttcgtttctggcatttgtcacatcgtatatttaccggaagatcttttcgaaatatgagcgtgtggaagaacccgaagcagagacagaagaagcataacaaattttacgaatatttgtaaaaagcagagaaaagaagataagaaaatgatacgttccggcagaaagtgtttctgcacgggacgtatttgcgttagagagaaaatgcaagcgattgcatggaaaactgtaattattcataaaaatattataacccttatgtagcataaacaaaaaagatatgttatagtaaagaaaatcattctgaaaacatctctttcagaattattccggcgtttctgccagaaaatcaacgatcaaaaatagtatggaaacacaagaaaaaagaaagaaaatcgcatgtgcggttcttatttttgtacagaaataaaagaggctaagagaagatacgcagtgcgatttgggaaggagtggtatcggctttgtttagcacagttttatcagcatctctgcagggaatgcaggcagagtttatccatgtggaggcagatgtgggaaatggacttccattttttcatatggtaggtcatcttgcatcggaagtaaaagagtcggcagagcgtgttcgcacggcagtaaaaaacagcggcatacagattccgccaagaaaggtagtgattaatctttctccggcaaatgtaagaaaaagaggagcaacatttgacctcccaatcgcggcagcagtgcttgcagccaatggggtgatcagtcaggaaacgcttgtaaatgtacttataatcggagagttaagtctcgatggtggtgtgaaaaaagttcccgggattctcccaattcttctggaagcaaaagaacatggatgcgtccgctgcatgattccaaaggagaatgaacaggaagggagaagtatcacagggatggaagtgatcggtgtgtcaaaattgacagaactgattgaagttgcaaaaaaaatagaacaggagggtgagaaaattgtctggaaaaatcataaagtgtcgggagagcggaatatagaagttgaggatagatgtcagggttcagaggattttagcgagatcaaagggcagacatttgtaaagcgggcggcagaaatcgcagttgcaggagaacataatcttttgctgatcggaccgccaggttccggaaaaacgatggtagcaagacggattccaaccatctttcctccgctttcgatggaggaatgcatagagatttcgaaagtgtatagtgttgcaggatttttggatgaaaagcggcctctgattttagctcgtccatttcgtgcggtacatcacacggtcacaaaggctgcgcttgtaggaggaggtttgcatcctgttccgggagaattgagcttaagtcatggtggatgtctgtttttggatgaggcggcagaatttcgaaaagatgtgctggaggcgttaagagaaccgttggaagaacagaagattcatattgtcagaaatggaggaagctatatatttccggcagatacgattgtagtggcggcaatgaatccgtgtccatgcggacagtttccggattacaatcgatgtcggtgcagtgaacaggaaatccgcaattatttaggcagaatcagcggaccactgcttgatcggatcgatctttgcgtagatgtaccgaaggtgaggtatgaaagcctgatccaaaccgatgaggaggagacatccgatattatccgtgcgcgagtatgtgcagcgcgagagattcaaaagaaacgatatgaggggcagaagaagcagacaaatggaagggtatccgtcaaaacactgatggagcattgtgaattggatccggagggaaaagaaaagatgaaaagaagttttgagacgcttcagttgactgcccgctcctactataaagtacttcgggtagcaaggacgatcgcagatctggaaggcagtgaaaagattgaatcgacccatttggatgaagcgttgatttaccgtacaatggatcagaaatattggagataatggtggaggaataatgtggaaaaacaaagagagaatcagatagaacaagatgaactattccgtttttggtttgcgggattaaagggaatcggaaacagggaaaaaatacagctgacaaaggaatttcctcaaaaaaacacgctatattatatagaagaaacagcattgaagaagaggttaaaagagaagtggacggaggaaaaggcggagacgatcacgcagatcatacaagaaggaaaacggcgatggagaaaagaaattgttgcagaatggcaaaaaaaagggattgcgcttgtcacatatgaacaggaaaaatacccggacagattaaggaacatttcttcaccgccttatgcgctctatgtgatgggaaaacttccggaaaagggaagaaggactgcggcaattgtcggcgccagaaactgtacgtattatggggaaacttatgcaagaaagattggaaaaatattgagtgaagcggggatttctgtgatcagtgggatggcaagaggaatcgatgcagcaggtcaaagaggggcaatccacgggagcggaggaacatttggtattcttggaagcggtgtggatatttgctatccaaaagagaatcgagggctctatgaagatttaaaaaaatatggaggaattttgtcagaacaacaaccggggagcccgccgcttgcacagtattttccggcgagaaaccggttgatcagtgggttggcagatgtggtgatcatcattgaggcgagagaacggagcgggtcgctgattacagctgatatggcgctggagcaggggaaagatgtatatgcacttccgggcagtgtggacagccaattgagcagaggctgcaaccgtctgatcaagcagggagcggggattattttatcaccggaagagcttttagaggaactgaatatttgtggaaattttgtgaagaatttgacagaaacaaaaataatacttgaaactgaacagaatatagtgtatagttgtctcgatttgaacccgaagagtatcggccagatactggcggaaacaaagctgtcgattccagagctgatgaggcagcttgtttctttggaaatgaatggaaagatcaaagaaatttccaaaggatactatgtgagaggaaattggtagaaagaaaagaaatcgaaataaagggacagaaataaaggagtagtttatggcacgttatcttgtgattgtagaatcgcctgcaaaagttaagacaattaaaaaatttctgggaagtaattatgttgtgacagcatcccagggacatgtgagagatctgccaaagagccagcttggaattgatgtagaaaatgattttgagcctaaatacattacaatccgcgggaaaggagatattcttgcgaatcttagaaaagaagtgaagaaggcagataaaatttatctcgcaactgaccctgaccgtgagggagaggcaatttcgtggcatttgtatgtagcactgaagctggaaggaaagaaagtgtaccgtatcagcttcaatgagatcacgaagaatgcggtgaaggcgtctatcaaagatgcgcgggagatcaatatgaacctggttgatgcacagcaggcaaggcgtgcgttagaccggatggtagggtacaagatcagtccgctgctttgggcgaaagtaaagaggggattaagtgcagggagagtacagtctgtggcgcttcgcattattgctgatcgtgaagaagaaattgatgcatttattccggaagaatactggacacttgatgcaacgatccatgttgaaggtgagaaaaagccgcttgtggcaagtttctacgggaaagataagaaaaaaatgaccattcattcgaaagaagagatggatcagattgtccgtgaaattgagcacgaaaaattctttgtagatgaagtgaaagtaagtgagcgtctgaagaaagcgccacttccgtttacgacaagtacactgcagcaggaagcgtcaaaggtactgaactttgctacgcagaagacgatgcggattgcgcagcaattgtacgagggagttgatatcaaaggcagtggtacgattggtattatcacatacctccgtacggattccacaagaatttcggatgaggcagatgcagcggcaagagaatatatccgagaagtttatggagaaaattttgtggcagagggagaaaagaagaaagcttctgagaaaaagattcaggatgcccacgaggcgattcgaccgacagatcttagcaggacaccggcttctgtgaaagaatctctgacaagagatcagtttcgtttgtatcagttgatctggaagcggtttgcagcaagcaggatgcagccggcgaaatttgaatctacttctgtaaaaattggcgcgggagcatatcaattttcagtatcaacttcaaaagttgtgtttgaaggattccgcatcgcttatgtggagtcagacgaagaaaagatggcgagcaatctgcttgtgaaaggattggatcaagattctgttctgacaaaagaagcgttggaagaaaaacagcattttacacagccgccggcacactatacagaagcagcactggtaaagacactggaagaactggggattggacggccgagtacgtatgcaccgacaatctctacaatcattgcaagacgatatgtttcgaaagaaaataagaacctctatctgaccgaacttggagaagttgtaaataacatgatgaaacaatcattcccaagtattgttgatgtgaactttactgccaatatggaagggctgcttgatatggttgaggaaggaaaagtggaatggaagtctgtgatccgcaacttctatccggatcttgatgaggctgtaaaagtagcagagaaagaattggagagtgttaagatcgaggatgaggtgactgacgttatctgtgaggaatgcggaagaaatatggtgatcaagtatggtccacatggaagattccttgcatgcccgggattcccggaatgcagaaatacaaagccttatttggaaaaaatcggtgtcccatgtccgctctgtggaaaagaagttgtactgcgcaaaacaaaaaaaggtcggaagtattatggatgtgaggacaatccggaatgcgaatttatgtcatggcagaagccatctaaggaaaaatgtccggaatgtggcggatatatgatcgaaaaaggaaataagcttgtctgtgcagatgaaaaatgtggatatgtcagaaataacaaaaagaattagaaaaaatccgttgaattttttgaaaatgcgtgataatatagacgtgtgaaaagagttttgacgttttgtggatatatttgctacaataaacaaaagcagtaaaatagacagatgatggacgtcgtgaacggaggcgaataaatgagcgtacagttattagacaagacaagaaaaattaataaacttctgcacaataacaattcaagcaaagttgtattcaatgacatttgtgaagtgttgacagagattcttaattctaacgtatttgttgtgagtaaaaaaggaaaagtgcttggaatcagtaaatgcgaaggagtcgatgaaatacaggagctgattacaaatgaggtcggaggacacattgatgagatgttaaatgagagattgttaagcattctttctacaaaggaaaatgtgaatcttcagacacttggattttcaccagaacatgtaagaaattatcaggcgatcatcacgccgatcaatattgcagatgaaagactgggaacgttgttcatctataagagagattctttatacgagatcgatgatattattctgagtgagtatggaacaactgttgtaggattagagatgcttcgcgcggtcaatgaagaaagtgcagaagaggtcagaaaagagcagattgtcaagtcggcgatcagcactctttccttctcggagatggaggcgatcatccatatctttgatgaactggagggaacagaaggaattcttgtggcaagtaaaattgcggaccgtgtaggaattacccgttctgtgatcgtaaatgcacttcgtaagtttgagagcgcaggagtgatcgaatctcgttcttccggtatgaaaggaacttatattcgtgtcatcaacgattttgttttcaaagaactggaaaatttgaaaaaagatacaaagcatagagaataagaaaaaagggtatcagaggcagaactgataccctttcgctgattgtgacaggaaaggggcaaagataatgtttgaaaattgcagagcgaaaatatcgatggaagaactgatcggaacaaaggaagaaaaaagtgagaacagctatgaaggaatcattttgatgtatgatccgaagacagagtgcatatatttgaatctggaggagacagatctttcaaaaatttcgctggatgtatcgtatcgctgcacggtttttttgggagaagaggcagaagaatgcgttggaagagtgagagagagattccttggaaaaagcggaaatattctgattcttcaaattgaaaatggattttataaaataaatataaactgagttgacaaatgaaaaacatagtgctattttattagtaaagcaaattagcactcgaataaaatgagtgctaataaaggcggcgcagacaccccgtacagatagactgtgtggggcggaaagcttttgaggctttcgcatagaccttgaaattgcggtagtataaggaggaatttacatgaaattagtaccattaggtgacagagtcgtattgaaacaattagtcgcagaagaaacaacaaaatccggaatcgtattaccgggacagtcaaaggagaaaccacagcaggcggaagttgtagcggtaggacctggcggaacagttgatgggaaagaagttacgatgaacgtggctgtcggaaatcaggtgatttattcaaaatacgccggtacagaagtttccttagaagatgaggaatacattattgtaaaacagagtgatattcttgcaatcatcgaataggaataaaacaacagaaagagaatagaaaggtgacatcaggtcatcgaagaagatagagagacagaatttaaggaggacatcagtcatggcaaaagaaattaaatatggcgcagaggccagaagtgctttggaatcaggtgtaaatcaattagcaaatacagtacgtgtgacattaggaccgaagggaagaaatgtagttctggataaatcattcggtgctccgctgatcacaaatgatggtgtgacgatcgcaaaagagattgaactggaagatgcttttgagaatatgggagcacagctgatccgtgaagtggcagcaaagacaaacgatgttgccggagacggaacaacgacagcgactgtattggcacaggccatggtcaatgaaggaatgaagaacctggcagcaggtgcaaatccaatcgtacttcgcaagggtatgaagaaagcaacagatgttgcagtggaagcagttgcaggcatgagcagtaaagtagaaagcaaagaaagaatcgcaaatgtagctgcaatctccgcaggagatatagaagttggagagatggttgcagatgcaatggagaaagtatccaatgatggtgtcattacgattgaagagtctaagacaatgaaaacagagttggaccttgtagaaggtatgcagtttgatcgtggatatatttctgcatatatggcgacagatatggataagatggaagcaaatctggaagatccatatattctgatcacagataaaaagattgcgaacattcaggaattacttccattgttagagcaggttgtgcaggcaggagcaaaacttctgatcgttgcagaggatatcgaaggagaagcgctgacaacattgatcgtcaataaattgcgtggtacattccaggtagttggagtaaaggcaccgggttatggagacagaagaaaagctatgttagaagatattgcgattctgacaggcggacaggtgatctcagaagaattgggattagatttaaaagagactacactggatatgctgggacgtgcaaaatctgtaaaagttcagaaagaaaatacagtgatcgtagatggacttggagagaaggaagcaatcaacgcacgtgttgcacagattaaggcacagattgaagagacaacatctgagttcgataaagaaaaacttcaggaaagactcgcaaaacttgctggtggtgttgcagtaatccgtgtaggtgcagcgacagaaactgagatgaaagaagcaaaacttcgtatggaagatgcgctttcagcagcaagagcagcagtggaagaaggaattgtagcaggtggtggatctgcatatatccatgcatccaaagaagttactaagcttgcagaaacattagaaggagacgagaagacaggtgcaaatattatcttaaaagcactggaagctccgttattccacattgcggcaaatgcaggtttggaaggttctgtcatcatcaataaagtaagagaacagcagccgggaatcggatttgatgcttataacgaagaatatgttgatatggtaaaagcaggaattttggatccggcaaaagtgacaagaagtgcattacagaatgcgacaagtgttgcatctacacttcttacaacagagtctgttgtggcaaatataaaagaagatgttcctcctatgccggcgggcggaccaggaatgggtatgatgtaaattttgaaaggacagatgagtaccggagaataggccggtactcatctttttttctttactgttttttagaatgtgatataataaaaatatatgtaaaaaatggaggtacagcaaagatgagtgatttttacacagaacaacttgtcaagagaaaggcatcaatgggtacaatggtggcaaaagctgcattgatcgcgcttacagtggtatcgcttttatcgttttttctgtttccgctggggattcttttctttggaattatgatagtggcagatatttttttgttccggcagttagacctggaatttgaatatttatatgtcaacggggatcttgatatcgataagatcatggcgaagcagaagagaaagagagtgtttcagacaaatgtcagcgaactggaagtgattgcgcctacagggtcagcagaactgaatgcatttcagaatatcaaggcacataatttcagcacgatgaatccggatcataagacatacacaatggtggtagtaaagaacggacagaaggagaagattatttttgaaccaaatcagacaattctggaaggaatgcgaatgctggcgccaagaaaggtaattctctaaataaaaaacaatttatagcttgacattgtgccaggttttttgtaatataacaataccttataaaacgacaaaagttatttatagcattaataagttatgcttataagtgctgtaaagatgaaatgttactaagaaaatgggataaacaaaagaaagagaggaagcaaaatcatgggaaaaattattggagaaggtattacatttgatgacgtgctgttagtgccggcttattcagaagtaatcccgaatcaggttgatctgtctacaaatctgacgaagaaaattaaattaaacataccgatgatgagtgcaggaatggatacggttacagaacatcgtatggcgattgcaatggctcgtcagggtggaatcggaattattcacaagaacatgtcaattgaagaacaggcagaagaagtcgacaaagtaaagcgttctgaaaatggagttatcacagatccattttatttgtcaccggaacatacacttgcagatgcaaatgatctgatggcgaaattccgtatttccggagttccaattacagaaggaaagaaattagtaggaattattacaaaccgtgatttaaaattcgaagaggattttacaaagaagatcaaagaatctatgacatccgaaggtctgattacagctccggaaggcatcactttggaagaggcaaaaaagatccttgcaaaggcgagaaaagaaaagcttccgatcgtggataaagatttcaatctgaaagggcttatcacaatcaaagatatcgagaaacagatcaaatacccgctttcagcgaaggacgagcagggacgtcttctctgtggagctgcagttggaattacagcaaactgtctggaacgagtagatgcactcgtgaaagcgaaggtagacgttgttgttatggattctgcacatggacattctgcaaatgtaatcagaacagttcgtatggtcaaagaaaaatatccggatttacaggtaatcgcaggaaatgttgcaacaggagaggctacaagagcattgattgaggcaggcgttgacgcagtgaaggttggtatcggacctggatctatctgtacaacacgtattgttgcaggaattggtgttccgcagatcacagcagtgatggattgctatgaagttgcaaaagaatatggcattccggtcatcgctgatggaggtatcaaatattcaggagatatgacaaaagcagttgcggcaggagcaaatgtatgtatgatgggaagtatcttcgcaggatgtgatgagagcccaggaacatttgaattattccagggaagaaaatacaaagtataccgtggaatgggatcgatcgcagcgatggaaaatggaagcaaagaccgttacttccaggcagatgcgaagaaacttgttccagaaggtgtagaaggacgtgtggcatataaaggaactgtagaagataccgtattccagctcatgggtggtcttcgtgccggaatgggatattgcggggcaaagacaatcgaagaactgaaagaaagtggaagatttgtgaagatttctgctgcttccttaaaggaaagtcatccgcatgatattcatattacaaaagaagcaccaaactacagtgtggacgaatagaaaataaagagaggactgccagacggcggtccttttgcaatattttaagaaaaacttcattcttttaggaaaatcttgtgctagaatagatagagataagagaatcaaaaggataaaagagcatgagatacagaaaaagagattattatggaagaggaagaaaaagaaagcacatagtagttgcagcaggaatcattatcgtttttgctttgagtatagtgttaggtctgatgaaagcgtgcggaatcgggtttttcggcagggcagaacagcttagccaagaggagattgaagagcggaaaccagatattgacgttcagctgctcacagtcaatgaatattccagaccagggacggaagtggaaaaaatcagagggattgtgatccattatacggcaaatccgggttctacagcacagaataaccgagattattttgagggactgaaagatagccatgaaacgagtgtaagcagccattttgttgtcggattggaaggagagattatccagtgtgttccgacgtgggagatggcatatgcgtctaattcaagaaatgtcgatacagtttccattgaatgctgtcatcccgatgaaactggtaaatttaacaggaagacatatcgttccgttgtagaagtgactgcatggctttgccagaagtttggactgacggaagaggatgtgatccgtcattatgatgtgacaggaaaagcatgtccgctttactatgttgaatatgagaaaaaatgggaagaatttaaaaaagatgtaaaaaaagcaatgcgataaaatagaaaaaagacagggtacggggaggaaaaagatgttcgatatgttttttccggatgaatatgtggcatccacatatgtgattccgtttgaagaattatatgaaaaagggtacagaggtgtattatttgatatcgataatacgttagtgccgcacggtgcaccggcagatgagcgggccaaaaagctgtttgcaagactgaaggagattggattttcttgttgtctgatttcaaataatcaggaaccaagggtgaagatgtttaatgaggaaatccaggtgccttatatttacaatgcccacaagccgtctacaaagaattatcgaaaagcaatggaactgatggggacagatgaaaagaattctttgtttgtgggggatcagttatttaccgatgttcttggtgcaaagcgtgcaggaatgcacaacattttagtgaagccgatgcatccgaaagaagagattcagattgttttgaaacggtatctggagcggattgtgcttcatttttacaagaaaaagcagaataagccaactcttaagtaaaaaaaggttgaaaatactcgcgaagtattataaaatggtaaacagtcaaatgaatgagaattgctttcatgggcataatttaaggaggattacagatgatttcagcaggagattttaaaaacggtgtaacagttgaaattgaaggaaatattttccagattatggagtttcagcatgtaaaaccaggtaaaggtgcggcgtttgttagaacaaaattaaaaaatattatcagtgggggtgtggtagagaagacattcagacctactgagaaattcccaaaagctcacatcgagagaaaagacatgcagtacttatatacagatggtgaattatatcacttcatggatgtcgagaattacgagcagatcgcgttaaatgaggatgcgattggagattctctgaaattcgtaaaagaaaatgaaatggtaaaaatctgttctcacaaaggaaatgtatttgcagtagagccgccgttatttgtagagcttcagatcacagatacagagcctggattcaaaggagatacagcacagggagctacaaagccagctgttgttgagacaggtgctacagtatacgttccattgttcgtagagcagggagatgtattaaagattgatactcgtacaggagagtatttatcaagagtttaatttaaataagattgacagtggcttaacggccacagaagaccagataagactgttgcagatatgtgacagtcttattttttcgtaaaatgtacataaagagaggtattaaaaacagaactgaaatgtataaggaagagaaatgcgggcatactgacagatagaacagagtagcaagcgaaaaagtgggggtaatcagtatgttaaattttttatgtgggatgtgggccggaagtacgattggagtattggtgatgtgtctgattcaaggaggcaaagagggagaagtgagagaagacaaagaaaagtaagaagaaggggaagaacattttttagaaaaaatgtagaaattagtaacaaaaatataagaaaaaatagcttgcatcagagggaatcgaaaggtataatgtgtttacatcatttcaaattcatttcaatcaaatcaattttcgcaggtacgggtcgtaccaatatccgacaggatgttatttcatggactttctgattataaaagaaaggaaagagtatgaattatcaacaatttattgaagaagtagaaagacgagtaaaagaaaaaatcaagggaaatgagacgattaccgtctatatccacacagcagttaagaataatggaaaagaacgaaaagggattactgtgtcagagaaaggaatccatatttcgcctaccatttatttagaagaatattttcagcagtttcaggaagggaagccgattgagaaaattgtggagaagattcttcaactttatgaggaagttaagtgcagtcatccatgcgaggagagtcttttgcagaattatgaagagctgaaggggaaatttgcatgcaaattgattcatcggggaaaaaatgaaaagctactgaatgacatcccttatgttccgtggatggatctggcaatagtagtgtttgtccttttggaagtcagtccatatggaacggcgacagttcttgttaggaaggaacacttggaaatatggggactgacagaagcacaacttttcgatgaggcgaaaaaaaatacgccgattctgcttccgtaccagttttgcccgatgcggaagctgcttcgggaaatctgcccatatgcagtggatgagggagaagaggaagaagaaagtctatatgtactttccaacaagctgagaagttttggagcagcaagtatgctctatgaggggatccttgagaaggtggggcagaagctgggagagaattattatattcttccgagcagcatccatgaggtgatcgttgtcccggagagcaaaagtccggtgaagcaagacctggaagaaatggtcagagagatcaatgaaacgcaggtggaagaggaggaagtgctttcagacagagtatattatttcagtcgaaaggaaaatcgattgtttttatagttgggctttacttttgaaaaaaagtatgttattataaaaaagcggtttacgaagtaaatgcgccatatacacctatagctcaggggatagagcaccgccctccggaggcgggtgcggcggttcgaatccgcctaggtgtgtataccaataggaggtaattatgaagcggtcgaagcggacggcgaattctttcaggaggtatatcaggcgttacttaaaagcaatgtgtagaaagagaagaaatcagaagaagcatcgaagtgtgaggtgtcaaagagcacaagtgctgtttcgcatgagttttatcctgattatcgccagtattctttttaccaatgaaaaatcacagaagatcacatcagagaaatcaaagtcagttcagacatctgagcattatctattagagaacaatccattagaaaaaaataaatatcagccattgaattaccttgtcgtggattattttacaaaactatcttcaggaaatttggatggaatttgcaaactatatgagtcatttagtgaagaatctttcgaaaagataaagaccggacagaatctggctgaatggtatcagggaattgatatttacacaaagaaggcgaaagagccacatgcctatgttgcctttgtcagctatcatatgaaacttcgcggtgcagacctacttttgcctgggcttgagacgatgtatgtcagagaagagaaagatggaacttttcatcttgtggacaaaccttatgagccggaagttgagcaggaaattagagcactagccaaagaaagagcagtcagagaacttctctgtcaggtggaaaatcagtatgcatatgcgagcagagacaaagaagcattgcagagcgctttggcgtggcaacaaggcagtgatgagtagagagaacacagaaataggtatagaaaaagatgcccgcagggaaacgaactgaggtaaccactcaatttgtaccgatgggcatctttttgctgctcaaaaattttttcaaaatctaatttaaattgatcttcttcgacaaaatatagtgcgtgatcacataggcaatcactgcctgcacaatggcgagtatgagagagttcttcgtaatagaaagaaaatattctgtctgagaataagattccgtgaagaatcgggttgtctccgaaccgaacccgatagtatttggaagtgtccctgagagaacacttgtcagtaaaacaatcactgaaacaagggcggtaagacctaaataagtcagcagtgccattaaaatccgatgtttggagaaaagctgtccgactgcaatgcagaagtagattaaaataatccctgtgaatgcagagatgcagtttaataagaacatcaggataaaaaaggcgttggagtccattcccagttcttttgtcagagcttcagatagttccggccagtgggcggaaacttctggaaccatgacaagaatgataaaagaagcaaagataatgacagtatcgatcagcgcccaaagaccgccaaccagtgtacgggcaagcagatgctgtccaggcgtcaccggcaaggtaaaagccaggtatccttcatcactaaacaaactctgatagaaccggacagagataaacagttgtgtaccggtactgatacccacaagcgaaaacaagtagagcgtgattaatatgataaagacaacagttggaacccgttcgtaaacttttcctgtaataaaaaagcgtccgagaatacttgcaagcagaagcagagcatgaagtggaagcaacagtcgtgactgcgagcgcatttcatatttcattaatcgacttaacattggaacacctcccggaataatgtatcgatggatttcttctgctgaaagcgaatctcatctaccgaatggtttaaaatcagttgcccattctgaagaaagagaacgcgatcgagtatattctcaatctctgcgatcaagtgcgtagagagcagaatcgtcgcattttcgttgtaattagagagaatggtactcagaatatactgtcgggcagcaggatcgacaccgccgatcggctcatccaaaatatagagatcggcatcccggctcatgacaaggatgagctgtactttttcccgggaaccctttgacaatgtgcggagtctggcgtccggactgatcccgaggcgctccaacatttccagtgcacgttctttgacaaagttcgcatagaaatcatcaaaataagcgatgatttcacgcactttcatccagtcattcagataggtgcgctcagggagataagaaacaatctcctttgtccgtgtgcaaggcgccattccatcgatcaggacttttccggaagtaggagtgagaagtccgttgatcagtttgatcagtgtagattttccacttccacttggaccgagaagccctacaatctgtccgcgctccagtgtaagtgaaaaatcagaaagtgcaggaaaatgattgtattcttttgttaaagactgacattgtaatattggatccatctagttctccccctctgctgcttttgttactaaagtaagcagctctgcacgtgaaaagccgagctgctccatcttctgaaaaaattcttgaatatgttctgttgcaagttcctttttcatttgtgtcaacatctctgtatcttctgtgataaatctcccgcttgtccgctgtgagtacacaagaccgctgcgttcgagctctgacaatgctttctgcattgtgttcgggttgacagcagcttccagtgcaagatcccggacagagggcaatttatctccaggctgatagactcccgcgataatatccctttgaatacgctccatgagctgaaggtaaattgggcggtcattgtccagtgtccatgacataattttatcacctcgtttgtattattgatataatacaattattttaaagagaaatggaagaaaagtcaagagaatggagaaaaggattattcatttgcagagataatctggtctgcaaggtctggataaaaggtctggcggcgaagcatctccatctcgtatttatatggtgcgtaggatttcttctcttttgtcggagaaggaatataaggggtctcaaggattttcgggacatctgtaaaatccgggtgatgtacgatataggagagtgcatcaaatccaatttctccaaatccgatattggcgtgccggtctttggcggctccagaaggattcttactgtcgttgacatggaagactgcaatctgatcctttccgatcagacggtcaaacttttcgatgacaccgtcaaagtcatggatgatatcgtaaccgctgtcgcttgtgtgacaggtgtcgaagcagacgcgcagtttgtcgctgtgaatgacaccgtcatagatctgtgcgagttcttcgaagctgcgtccgatctcagatccctttcccgccatggtctccagtgcaatgttacaaggggtatcagctgtgagtacctcgttgagtcctttgataatctgtgcaattccagcttcggttcctgctccgacatgggcgcctggatgcagaatcaatgtttgacttttgcaggcggcagtccgttcaatctcgagctgaagaaattgtactgcaagctcgaaagtctcaggttttacagagtttccgagattgatgatgtagggagcgtggacgatgatttcttcaatctgatgttgggacagatagtcccatgcggcatcaatatttaattcgctgatagactttcttcttgtattctggggtgccccggtatagaacataaatgtatctgcaccgtaggaaaccgcttcttttgcggagccaagcagcatttccttgccgctcattccaacatgtgaacctaatttcatagatagacctcatttctgtaaagtcccccgcaggggggactattttttgatgaatttttcttttggcattttgcaaagtgggcaggtaaaggagtctggaagttcctcaaaaggagtttctccgtcatagacatatccacataccgaacatacccatgtttccttttttgccagagtttctgttttttcagtttcctcttccgaaagataggtcggagcatttttaggactctttcctttgatgactttgtggtagtaagcataagtcatagcaggatctgtccctttgctatcgccatcgatcacttccccaaggaagacggtgtgtgtgtttgtctccatctgatcaatgatcttacagacgatatatccgcagcagtcagtgagtacaggcaaatgttcctgctcctcataagaaactccggcaaacttatctgtgtcgcgacctgactgaaagccaaactgaccaatcagtgagggatcagacttttcggataagatagaaacagcaaaaacaccggcacgtttcatacagtcgtttgtataattatcatgattcatacttactgcgatggtagccggagaggatgtgatctgcataacactgttggcgacacatccggttggacggcttccatccagggtagtaacgacgtagactccgtaagacaaattgcgaaaaacatttgtgttcataaaaaaatcctcctttatctttgataatagtaattgttactgaaattatatcacaaatgaatgccagttacaactagtatacggaagaaaagcagatagatacaaatgttttcaaaataggtagttgttgctctatctttcttgtgctaaaataatgtattagcaatcgatgcacagaatcatcaaaagatgaagatggaggtattatgaagaaaatttttgaatttatacaggaagaattggaaaatgcatttgaagcggcagggtatgatcgcggactgggaaaggttacgttatcaaacagaccggatctatgtgaatatcagtgtaatggagcaatggcaggcgctaagacgtatagaaaagcaccgatcatgatcgcaaacgatgttgtggagaaacttcaggagagtacatgtattcaggaagcagaggcagttgctcctggatttatcaatctgaagcttgacagagagttccttgcaggttacttaaatcaaatgagcgaagatgcacatcttggatttgaaactgcaaaagagccaaagacaattattgttgattacggtggagcgaatgtggcgaaaccacttcatgttggtcatctgcgctcagcgattattggagagagcatcaagcggatcggaaaatttgcagggcatcatgtgatcggtgacgttcaccttggtgactggggatatcagatgggacttgtgatcacagagttaaagaagagaaaaccagaacttccgtattttgatgaaaactttgcgggggaatatccggaagaagctccgtttacaatcggggagttggaagaaatctatccgactgcaagtgcttatgcaaaagaacatgaagactataaagaagaagcgcttcaagcgacttttctgttacagaacggacaccgtggctatcgtgcagtgtggaaacatatcatgaatgtgtctgttgctgacttgaagaagaactatggcaacctgaatgtggacttcgatctctggaagggagaggcggatgcacaggagtatatcccggatatggtagaatacatgaagaaagaaggatatgcacatatcgacaatggggctcttgttgtagatgtaaaagaagagacagatacaaaggaaatcccgccatgtatgatcctaaaatcagacggtgcagcgctctatgatacgacagatcttgccactttgatcgaacgtgaaaaattataccagccggatgaagtgatctatgttgttgacaaacgtcaggagcttcattttgtacaggtatttcgctgtgcgagaaagacaaagatcgtgaatgagaaaacagatcttcagtttgtcggatttggcacgatgaatggaaaggacgggaagccgttcaagacaagagatggcggtgtgatgcgtctggaaaatctgattcgtgagatcaatgaggagatgtacaaaaaaattactgataaccgcaccgtatcagaagaagaggcgagaaagacagcacagatcgttggactttctgcaattaagtacggagatctctccaaccaggcatcaaaagattatgtgtttgatgtagacagatttacttcctttgaggggaatacaggaccatatatcctttatacgatcgtgagaatcaaatcaatccttgcaagatatgcagagatggaaggaagtaagacagatgtaaaactcctctcagcatgttcagacagcgaaaaagcattgatgttagaggctgcaaaattcaacagtgtgattgaaaatacgctggaagaactggctccgcataaaatctgtgcatacatttatgatctggcaaatacattcaatcgcttttatcatgagacaaagattcttgcagaagaagacaatgagcgtcaggcaagctttattgcactgctgacagtgacaaagaaagtacttgagacatgcattgatttgcttggatttgaagcgccggagagaatgtaggaaggataagcggtacagatgacagaaaaattattttatcaggacagtcatagaagtacgtttacggccatcgtgcaggaagtaagaccgtcggggaacgggtatgagattattcttgatcggactgcttttttcccggaaggcggtgggcaaagctcagataccggaagtctcggaggtgtttcagtgagtgatgtgcaggagatagatgggaagatcattcactacacggatgggcctcttgtggaaggaacggaagtagaaggatgtattgattggacagaacgtttttcgaaaatgcagcagcataccggggaacatattgtttcggggctgattcataagatatatggatatcataatgtagggtttcatcttgggacagacagtgtgacacttgattttaacggggttgttccgaaagaaaaactgcatgagatcgagcagcttgccaatgaggcggttgcaaaaaatctcccggtacaagtattgtatccgacggatgaggaactttcaaagatcagttaccgtagtaagattgagattgaagggcaggtacggatcgttgtgattgatggatatgatgtctgtgcctgctgtgcaccacatgtgaagcagacgggagaaatcggtttgatcaaacttgtcggcatgcaaaattacaagggcggtgtgcgcatctcgatgctctgtggatttcgtgcgctggaagattactatcagaaagaaaaaaataaccgggaaattgcagtgatgctttcggcgaaagaatatgagacagcggtggaagttgaaagacttcaggaagaacttgcgatgaagaaggcaaaaattgcagaactggaacggaagtttttggaacagaaagtagagacacttgatatttccagtgaaattgtctgcctgtttgaagagacagatccggttatgacgcgtgaactggtaaatcttctcttgaaaaaaggagcaaagatggcagctgtcttttctggaaatgagagagagggttaccgatatgtgctcggaagccgcagcctggatgtcagggaaaatggaaagcttctcaacgaagcgtttcatggacgcgggggaggaaagccggagatggtgcagggaactgtacaagggaaaagagaagagattgaggcgttcctgaattgtagatagaaatagagaagaaaaatatctgctaaagcagatggacgagagacagaaaagcagaaagaagagaggagactggatgaagcagagaagtattttagggcgagtggctgttccgcttttgatctattatggaatatcgctcgtcattacgatgtttgcaagcgccattgttgccggactgaagatgccacagtatctgaatggtcaggtcgagtatgcacagatggtaaccgagatgaccaatgagattttaaagtatacgactatcatcactggagtgacagcaattgtagcgataccgatattttggtggatgttccacaaagataaccggattagaagacagatggggatggctgaaccagcgaaagcctcaccggtaaaatatgtctggattgttatacttggtgtggcggcttgtgtggcgctgaacaatattcttacgttgagcaatcttgcgatgattagctcttacgaagaaactggggcaaatttttataaggtgaacattgtggcacagattatctgtctggggattctgacgccgattgcagaagaacttgcttttcgcggtttgatttttaaacgtttgcgggaagtaatgaacatgaaacgagctattttgatcagtgcactgatttttggaatttatcatggcaatcttgttcaggcagtttatggaggtgtgttgggtgccctgctttcatatgcttatgaaaaatacggatcgatcaaagcgccgatacttgcacatatggtattaaatctgacctctgtgatcttgtcagaaatcggtggatttagttggatgtttgaacaaccgatgcgaatgggaattgcaacagttgcatgtgcagcaatctctgcgacaatgtatgttatgattcagagaatcgggcagggagaagcagaccaaacatcatcagaacagcaataaagattgaaaaaacagaattgcaaaatgtcctgcgggaatcagcagatttccagcaggacattttgcatagcgagaagagaatcggaactattttgcaggaacaatttccaaccagtatccatcaggatcttcaataaagtagattcccattgcttcgttttcgaaacagacacatcccatttctttatgttttgcgagagattcttcgtaacagtctgtctcaaaagcaaggtgaaattcgttgtcaccaagattgtatggtcggtcccagtcacgaagccatgtaagttctaactggtgagaggttttgctgtcgccaagatacaccagggtaaaacttccgtcttctgcatgatgttcgcggacaacgtcaagtccgagcgcttccttataaaaggcaagagatttttccagatctcttatattaaaattattgtgtacaaatttaaaactcatagtcagcctcctgaaatttttctttgagtataacttgtcggagaaaaaatgtaaagaagttttccgaatttcaaagtgaagaatctgtgagagaaaggaggaagatgggacggaaaaatattacaaaaatgttaaaagttattgcattttaggtgaaaagaagctataatagcccatatgagagtagatatttgatctaaagcaataaatttagaaagtcaggataggtattttatgtataagaaaaagtttggaaaattagtgattatttcattaatggcagcagccttaacagtgacaccggtatttgctgcaccgacagtcaatgaattacagcagaagaaagcagaagagcagaataaagtaagttctctgcaggcagaattgacagaacttcttacaaagatgagcgatctggaagcagatctgattgaaaaaggtacagaagtgactcaggcaacagcagatttggaagatgcacagaagaaagaagaaaagcagtatgaagatatgaaacttcgtatcaaatacatgtatgaagaaggaaatacgacatttgttgagaaacttttgacagcagacagtatttcagaacttctgaatcaggcagattttgtacagagtgtccattcttatgacagaaaaatgcttcaggaatatgtggatactaaacagcagatcgcagatttgaaagcgactctggagacagagatggcaaatatggagcagatgcaggatgattatgaaggagaaaagcagaatctgaatgcaacaattgagacacatagagcaaatgtagcagattttgatgtgcaattacaggcggcagttcaggcagcagcagaggcggctgctcagagagaggcagagcttcaggcttccgtaaatgaaattacaggtggccagaataatggcaacacaggtggtcagtcaggaaatgttggaggttccggacagaataacaatggaaatacaagtgtgacaccaccgcagggtggttctggggatacaacaggtggtgtagagcagacaccaagtgtaccagagatcccacagcagccagaacagccgcagcaaccacaacagcctgtgactcctccggtaggagatacaagcgtaggacaggcgatcgtcaatgttgcttatggatatcttggcatcccatatgtatggggaggaacgacaacagctggatttgactgttccggtatggtgcaggcagcacatgcggcagttggaatcggtcttccacgtgtcagtgaagcgcagggggcatgtggacaggcagtaggaagtatggcagaggcacttccgggtgatattgtatgttatggttatcatgtaggaatttatatcggcggtggacagatgattcatgcaccagagccgggagatgttgtaaaagtatcttcagtatacggctctccatggtttagacgctgctggtaatcagagagaataaaaaagaatcagagagctttcaaaagtgttctgcatatttggagaaacacgatgtgctacttgatagttgaagaggagagggttgaagttatcaaccctcttttgtgtattaacaggaaatcattcaaaagagaaaggaaaacgtatgagaaagagaattgggaagacagttgtggcagtgactttagtcggttcgatggcggtaacacctgtatttgccgctccggcaaaggaaaatgaaaaacagacgaaagaaagttccgtgtcagatctccaaagtgaattggaacaggtgatgacaaagatggcagacctagagacaaaactgatcgcaaaaggagaagagatccagaaagcttccaaagaattgcagcaggcggaagaaaaatcagcaaagcagtatgaagatatgaagttacgtattaaatacatgtatgaagccggagatacagaacttgagaaatttatcaatgcggagtcggccggggacgcattgaataaggcagaatatgtgcaggcagtttatacttatgaccgagataaacttcaagaatatgttgatacgaaaaaagagattgagaatctgaagactacattggaaaaggataaggcatctctggagaaaatgaatacagaactgaatgtgaagaaggagacattgacaacgactatccagacaaagcaggcagaagaacagcaagtacttgcagctgctcaggcggtagcggaaaaacgtcaggcggaaggaaaagcagagaagacggataatccagaaaaagaagaaacaacacctgcacagccagatgaaagtgttcaagaacaagtaccggtagagccagagacaccgagtgaaccgcagacacctgcacagccggaaacgccaagtgagccacaggcaccggcagaaccggagacaccaagtgagccacagacacctgcacagccggagacaccgagtgagccacaaataccgacagagccggagatgccgagcgagccacagacaccggcagagccagagacgccaagtgagccacaggcaccggcagagtcagagacaccaagtgaaccgcagacaccggcagaaccggaaacaccaagtgaaccgcagacaccggaagaaaatcagagtgcggcacagcagattgtaagtgcggcatatagtttccttggaatcccatatgtatggggaggaacgacaacagcaggatttgattgttccggtatggtacaggcggctcatgcggcagcagggatttctattccacgtgtttcctgggatcagggagcggcaggagttgaagtatctgcttcggaggcacttccgggagatattgtatattatggatggcatgtgggaatctatattggaaatggtcagatgatccatgcaccggaagaaggagatgtagtaaaaatttcaacagtagactgggcggcgcatacatttgtacgttgctggtaatggagataaggatggacgaaagagagcgttcatcctttttttgtagaaaaattactgcagcttatggagtaaaaatacattttgtatgagcaatcgcggtttgtgaaaagaaaatcgaatagaatattttgaagaaaatccggcaatcctaatcaggtaaaagcaggaggaagattgcatggaagagaataagaaaaaaataatggggacattggaggagaatgtcgcttatatgaatgaagttctgcctgtaaaagagagttttgaccttgtacagagagatattgtgatcggcggaaagaaaagcagctttttctttatcgacgggtttacaaaggatgatacaatgctcaagatcatgacctcttttttttcagtgacagaagaaaaaatgccagacagtgctacagagttttccaggttgctcgtaccttacgtagaggtcgatacactttctgaatttgatgggatcatcaaaaatttgttatcggggactacttgcctttttgtagatggctatgaagcatgtattgtgattgactgccgcacttatcccgccaggggagtggatgagccgtacaatgacaaatctctgcgtggcccaagagatggatttgtggagacgattgtttttaacacggcgcttatgagaagaagaatccgcgatccgcatctgatcatgaaaatgacagagataggagagagttcaaggactgatgtggcgatttgttatatggatgaccgggtcgatcaagaactgctgaaaaatctgaacagcagattggaaaaaattcatgtagatgctctgcggatgacgcagcagacgcttgcggaagaactgtttaagcggaagtggttcaatccgtttccaaaatttaaattcacagagaggccggatacagcagcgtcttgtctgctggagggaaaagttgtgattcttgtagacaactccccatcagcgatgatactaccgacgtcaattttagatatgatcgaagaggcaaatgattactattttcctactattacgaatgtgtatctgaaagtgtcacgtgcgttgatcacaattgccacagtgtttgttacaccattgtttttactatttatgcagaatcttgagtggcttccggaagtgtttgcgtttgtggcgatcaaagatacagtgaatattccgctgatttttcagttgctcattttggaacttgctattgacggacttcgcttggcggcaatgaatacaccaagtatgctgagtacaccgctcagtgtgatcgcaggaatcgttatgggagaattttcagtgcgctccgggtggtttaattctgaagtgatgctgtatatggcgtttgtcgcggttgcaaactatacacaacctaattttgaacttggatatgcgttaaaatttatgagactgttacttcttgttctgacggcaatgtttaactggatcggatttcttataggatgtgtgatcgtaattgtttcgatcgtttgtaataagacgctgtcggggagaagttatttgagaatcagtaaaaactaaaaattgacaagccaggtgaaagacagcggaaggaatacgctgccatacagacgaggaaaggcaaagaaatccaaaagtgaaatgtgaaaagtaaataaaatatagcgaaagaattgaatcgcatgaaaaagattgttataataaaatacaatgacagatagaactgatatttctgaagccccagaaatatcagtatttatttgtccaaaaattttggtagcagggatgtcagagaaaaaagagaaaggaagaagttgaaatggaacaaagcaaagatgaaaaactggggaccgagaagcttggaaaactcattgtaagtatggcgcttccggcagttgcagcacagctgatcaacgttctctataacatcgtagacagaatttatatcggacatatagcgggacatggagatatggcacttaccggtgtgggggtcacattcccgatcattactattatttcggcgttcagtgcattcgccggaatgggaggggcaccgattgcttctattcatttgggaaagaaagattatgagggagcggaaaagatacttggaaacagtacgagtcttctgctcttgttttcagttgtgttgactgcattctttatgatttttaaaacaccaattttatatgcatttggagcaagtgataacatcatctcatatgcgcaggagtacattacgatttatttagtgggtacagtgtttgtacagcttgcaatcgggctgaatacatttatcagcggtcagggaaatgcaaaagttgcaatgctgtccgttttgatcggagcaattattaatattgtgttggatccgatttttattttcttatttgatatgggagtgaaaggtgcagcgcttgccacaattctttctcaggcagtcagtgcagtttgggtagtgagattcctcgtgtcaaagaaaagcattatccgtatccgaaaaaaatatttgaaactaagcaaaaagattgtaggggcaattgcggcaatcggcatttccccgtttattatgcagagcacagaaagccttgtgacggttgtattgaacaatgggcttcagaaatatggcggagatctgtatgttggaacgatgtccattctgatgagtgtgatgcagttgatcattgttccgattcagggtgtttcacagggagtgcagccgatcatcagctataattttggtgcaggaaagagagaccgggtgatgggcgcatttaagcgaatgcttattatctgtctggcggcatcgatgacccttgggatttcagcgattgttggaccggaaattttcgcgagaatgtttacagataaaaaagaacttgtggatctgacagcaagtgtcatgccggtatatttctttggaattacgatttttgggatccagatggcatgtcagtgcgcgtttatcgcactggggcaggcaaagttatcactgtttgcggcacttttgagaaaggtgattttgctcgtgccattggcaatcattctcccgaaatatttcggagtgtccggaatttactatgcagaaccaattgcggatattattgcagtatttgtgacgagtgtcttatttttgacgatcacaagaaagtttttgcgtaattgcggaaataatgatatgatggggaaaagaaaacaataggaggcccatctatgagagaatatgtgataacaacggacagcacagtcgatcttccgaaagaatatttaagagaatatcaggtacaggcagtttcgctttcctatgagatagaaggggagacttatgaggatctaaatggtctggaaccggcagttttttatgaaaaaatgcgaaatggggcaatgccgacgacttctcaggcaaatccagaacaggtgagagagttgttcgagggaatattgaaagaaggaaaagacattctccacattgctttttcttccgggttgagtggaagttataatagcgcaaggatcgcggcagaagaactgaaggaaatgtatgaaggggcagaaatttgcgtgattgattccctctgtgcatcggtcggagaagggttattatatcacaaagcgagatgcatgaaggaaaaaggcaaaactttgcaggaagtagcagcatgggtggagaaaaacaagttacatatctgccataatgttgcggtggatgatctgaatcatttgtatcgaggagggagactttccaaaacgtcagcggtggtcgggtctatgatcaatatcaagccgttcatccacatggatgaaaatgggaagcttgttccgatcggaaaggtcagagggcgtaaaaaatcattgaatattctggtggatgcgatggcagagcagatcaagggatatgaggaagagaacgatgtgatcatgatcagccatggagactgtatagaagatgccagatatgtggggaaattggtagaagagcggtttgggatccacaatattttgattaattacgttggaacagttatcggctctcataccgggacaggagttgtagcgctctgttttatgggaaacaaacgatagagaaaatagaaagacgggatgctgaggggcaaatattttgctcatacggtatcctgtttttgtatgtgagcggtatatcccaggacagagtggtatgtcctagaacaaatagaaggagttttggaaacaatctaataagtttcaaaaaagtagttgacagtctgtggagaatgtagtatgatacatcttgtgtaaaacgaaaaagaaagtagagtatccactctcaccgcagcacaatcgggtgacttcggttaatataagaactatcactttcgtaaatgtagaaagttataggattgtattgtgtggatagtcgaagctattcacttttttttgcgttaaaagagtatgagagattagtttatggaggtgcacgactattagcgatttaatgattaatgagcagatcagagacaaggagattcgtctgatcggggaagatggagaacaattaggaatcatgtcaacaagagaagctatgaaattagcagcagaagcagagcttgacttggtgaagatagctccaacagcaaagccaccggtttgtaagattatcgactatggtaaatacaaatatgagttgacaagaaaagaaaaagaagcaaagaagaaacaaaaaacggtggatgtcaaagaagtgcgtttatcacctaatattgatacaaatgatttgaatacgaaagtaaataacgcaaagaaatttattcaaaaaggaaataaagtcaaagtgacattacgttttcgcggaagagagatggcacatatgcagacaagtaagcatattttagacgattttgcagatatgttaaaggatattgcagtcgtagagaagccaacgaaactcgaaggcagaagtatcagcatggttttaactgaaaaacgttaaaaataaataatctacatttaaggaggaaaaacatcatgccaaaaataaaaacaagtagagcagcagcaaaacgtttcaaaaaaacaggtacaggaaaattaaaaagaaataaagcttacaagagccatatcttaactaagaaatctacaaagagaaaaagaaatcttagacaggcaactatcacagatgctactaatgttaagaatatgaagaaaatcttaccatacttataagatttgaagaattgaaggaggattagaaagacatggcaagaattaaaggcggaatgaacgctagaaaaaaacacaatagaacattaaagctggcgaaaggttacagaggagccagatctaaacaatacagagttgcaaaacagtcagtgatgagagcactcacatcttcttacgcaggaagaaaagagcgcaaacgtcagatgagacagttatggatcgctcgtatcaacgcagctgcaagaatcaatggattatcttacagcaaatttatgtacggtttaaaattagctggagttgagatgaacagaaagatcttagctgatatggcaatcaatgatgcacagggatttgctacattagcagaagttgcaaaatctaaattagcttaattttgagatagaaaatcaatcagattttaaagagaggcagcgtaccacaaacgtggaatacgctgcctttttataatgcaaagaaaaaaatcactttttatgtttcctgttatcggaaggcgggagtgcgtcaacgagtttctcaatcaactgtttcttgacatatacatcaaaacttaatgtacagataaaagaaaacagacggagaaattcacgattctcctcatccgcatcagaaaaggtttcagaagaagtgcggtaaatttctgtaatatcttctttcagatgatcgatgcgggatttctcaaggctgcacacctcctcgtagagatctgtgaacgacagttccttatctgtgtggaagtagttctctgtgatcggtttgagcaatgtctcaatatctttgattgataaaatatttttaaaataatagataaaaatgagaaccatcacatgctctttagaatactttttcttcagaggaggcgggagaagttcattctttgcatagttgttgatcattgtttttgtgagaatcttatcgtcttcatatcgcttggaggatttcatgtggtcattcataaaagttgtgacctgatccatatataggtcgatatttggaatctcatctgcctttacatagtcaattcttgaaatactttctaaaatactgtttaggatatcttctgtgttaattgtcatgtcatcacctcatagtcttagtatatagtattgaaaacgaggaagcaacataaatataggtggttttaagaaaactattggatcaaatccggatgataggtacgaaaaactgtatttcaggcaggaagcttgaaatacagtttggggaaagcgtataatggcgatagaaaggaaagggaagaagagatgccaaagattgcagtatgtgatgatgacaaagagagcgtcatgcggttaaaagagatgattttatcagccggtatctcaaaagagatagactgctatgagagcggtgagaaattagtggagtccgatcagaactatgacattctttttcttgacattgatatgggtgggatgaatggcattgagacggcgaagattctcagggaaaaggacaagaatgtaaaaattatctatgtgacaagttatgcggaatatgtgcattacgcttttgcggttcatgcatttgcctatctcttgaaaccggtgagccaggagcaggtaaaagcgcagctgcaggaggcgatttcctattatcagaagaggaaaaaagaagatgagatcagtattcgatttgagacaaaggatgggtcagaacttgtaaagatcaatgatatttactattttgaataccgggaacgccgggtgtatgtaaagacaaaaaaggaaaatctgatcattcgcggagggatccgagagattgctgagcggatgaaaggatacgattttgcagtgcctcataaaagttttgtggtaaatcttttttatgtcaaagcggtgaaagggtatgatatccggatgatggatggcagtctgatcccgctttctcagaaaaaatcaacagaatttcggtcattgctgaataaattccttgcagggtgcatttaagatgctctgtcgtaagaaatacaggaagagaggcggggatggttttggtcgtaaatgtatggttgaatttcgtagaattaatcgtaatccagacgatgatctattattttttaagttgccttccgagaaacattcatagaccgaaatggtgttatctggtagtattttttctgcatagcatgacattttgttatgtgatctatcggtgggggaatacaggggcgggagcactggtaacagtggctggatgtatactggcctgctattttctatttaccacagaccagatacagatgttttacagctgtgtatatgtgacagtgttgatcctgtgtcaggggagtgttatatatggtctgggaagcatctatgcacgcctaggtctgtttattacttaccgggaggcaaatgtgatgattcttttgaagattgtggcagaaatttttgtgacaaaatgtttcgtgtggatttcccgaaaaagaagagagagcagtctgacaaagtttcagtatatagtttttttgatcgttccggtattcagtatagtgtatttctattccatctgcgtgttctcgggaatctatgttcagctttacgggatggagcttgtagtctttaatattgtattgctgcttgtgatgaatggatgtatgacatatttgcttgcaaaaattttgaagaccaattctcttcaaaatgaactgaatctggcaaatcagaaagaggagatgcagtgccggtattatgaggagatagagcagaagtatcaagaatccaggaagatcattcacgatatgagaaatcatcttcttgcaatcgagcagctccaaagctcaggagaagaagagcgagcaagagaatatataggagatgtacatcagatgttaaatatgtttggtcacaaatactacaccgataaccgtctgctaaatattatcttaaacgataaagaaaaggcggcaaatagagcaagtgtaacatttgatgcgagaatcggtgcgattgctttggagggaatgaaagacagtgatcttacaactgtttttgcgaatcttttggacaatgcagttgaggcagcgaaggaatcagagcaaaagcaagtggtgatacgggcggacagcattcatgaatttaatgtgatccgcattgaaaatacgatgtccttctgtcagaaaaagaaggaaggtcatatgggaatcggattggagaatgtgacaagagtgttgaaaaagtatgacggcagctttcagcgagaaaggatggatgggaaatatgtctgcatcgtgacgatgccaaaattcccgggaatgactgaaaaagcagagttcaatgaaaagaggaaatggatatgaaaaaatgtacagaaaaatggatgcgcgtatttgtatgtgccggatgtgcagcagcaatgatttttgcaggctgttccggtcaaaaaccattgtcagatcgttttgaggaagagacggtcaaaaagacggcagaagagattatcgaacttgttcatgaaggagactatgaaaagatcatagaggaatatgagagtgcaaagcttgtgacggtacttacagaggaggatttaagaaatgcagtgcagcctgtgatggaagaattgggtgagccggggaaaattgagaggacagttgtgactggaaatgaaaatccagagacgaaggaagagtacgcaactgcggtcagtatagtatcttatgaaaatgggaaagcacagtatacgatcacgtttaatcaggcgatgaagatggaaggtttttacattaaataagggaaggaaagaatggttatgttgggatggattattttcgctgtttttgcggtgatgggagttcttttatggacgggaaaaggaggatggctcatcgcaggctataacacagcgagcgcagaggaaaagaaaaaatatgatgagaaaaagctgaatagaacaatggcgaagggatggacaatcatcacagcaagccttctgtttcttaattttgcaaaggaagatatgactccggtttttctgacgatatttatgatccttatgtttgttggaatcggctatattctgctgatgataaataactgttatgtagaaacagaagaaatgtctgagacagagaaagaaaaaattgcaaaagaaagaaggaatggaagacggtattctttgatcatcctgataatcttagcagttttgacgggggtaccaatgtttgcaggttctgttaacatagaatttgaagaggataaaattcgtctgtcaggatttcttgttcctggatatacgttggagcaggaggaaattctctctgtggattacgaaaaagaactggatcttggaaggcggacgaatggaaatggttctgtgaggattcaggcagggcagttccgaaataagcgatttggaaattatcgtctgtacagttacaacgcatgcagagaatatgttgtgatcgatacagaagacaaaacaatcgttgtcaatgacaagacaccggagaggacaaaagaactatatgaaaaattaaaaatattttcagagaggtgatcacatatggcagaattttggtttttatttatctgtaacatgcttatacctgtgacaatgcttgttttaggctatttgttcaaaggaattcattttccaaaggatgtgaacgcactttgcggctatcgtacatcgatgtcaatgaaaaatgaaaagacctggaaattcgccaatgcctactggggaaaaatctgctggcagattggctggggtgtgactctggtcacagcctttgcgactatactctcttatctcgcaggagaagagatatttaatacgacatcgatcgtactttgtatgggacagtgtgcagttctgcttgtgacgatcattccggtagagagagcgctgaagaagaaatttgatcggaacggggaggagcgataagagatttccggcattgcgtttcgcggagagtttggtataataggataagcagtaagggataaggagtcaaaaaaactatgagtatatatgatacattaaatgcagagcagcgggaggcggtctttcacacggagggaccgcttcttatactggcaggagccggctctgggaaaacaagggtgctgacgcaccgtattgcatacctgattgaggagaaaggaatcaatccgtggaatattcttgcgatcacgttcacaaacaaggcggcaggcgagatgcgggagcgtgtagatgatatcgtaggatttggctcagaaagtatctgggtaagtacgtttcattctacttgcgtgcggattctgcgcaggcatattgaccggcttggatacgacaataactttacgatctatgacagcgatgatcagaagactttgatgaaagatgtatgcaaactacttcagattgatacaaaaacatatcgggaacgtacgatcttaagtgcgatttcctcggcaaaggatgagatgatcacaccggaagaatatgaattgaatgcatatggagatttcagcaagaagacgattgctgaggcttacaaagagtatgagaggcagttgaaggcaaacaatgcactggattttgatgatcttttagtaaagaccgtacagctgttccagacacagccggagatattggaatattatcaggaccgcttccgctatattatggtagatgagtatcaggataccaataccgtgcagtttaagttgatcagccttcttgcggcaaaatataaaaatctgtgtgtagtcggagatgatgatcagtcgatctataaattccgcggggcaaatatccagaatattttaagctttgaaaaagaatttgaacatacaaaagtgatcaaacttgagcagaattaccgttcgacgagcacaatcctcgatgcggcaaatgcagtgatcaaaaacaatgtaggaagaaaggcgaaatcactttggacggaaaatggagaaggggaaaaaatccagtttcgccaatttgacaccgcctacgatgaagctgaatatattgtaggagatatcagagaacgcgtagataatggaaaagcagcttactgtgatcatgcagttttgtaccgtacaaatgcacaatcccgtctgtttgaggaaaaaatgatcacagccaatattccatacaagattgtcggcggagtcaatttctatgcgagaaaggaaatcaaagatctgcttgcatatttaaaaacgattgataatggaaaagacgatcttgcagtgaggaggatcatcaatgttccgaagagaggaattggtcttacaacagtcaatcgcattacggaggcggcgcagcagagaggaatcagtttctacgaagcactgtgttctgccgatcttgttccgggattgggaagaagtatttccaaactagaatcttttgcggcgatgatcgaatatttccggaaagaagcagaacatctttcgattacagaactgatgaaagaaatccttacggaaaccgggtatgtggaagaactgaaggcagaaggagaagaggaggcagaagtacgtctccagaatatcgatgaatttctgaataaaatcgctgcatatgaagaatcctgtgaggaggagcttccgacactttccggatttttagaggaagtggcgctggtggcagatattgacagcttggatgaagaaagcgattatgttgtgctgatgaccttgcacagtgcaaaaggattggaattcccttatgtttatctggcagggatggaagatgggatttttccaagctacatgaccattacagcagatgatccgacagaactcgaggaggagagaagactctgttatgtcggaatcacccgggcaaaaaaagaacttgcgatgacttgtgccagaagacgtatgattcgcggggagacacaatataataaaatgtcaagatttttaaaagaagttccgccgcagctcttgtctaccgggaaaattgtggagaaagaagagctggaactaccgaagcagaatgcttatgttcaagcaaaacagtcttttcaagcaaaaccgtttatgatctcaaaaccggtacagcagtttggagtcaaaagcggggaaggactttcctatggtgtcggtgaccgtgtccgtcatatgaaattcggagaaggtacggtgactgcgatcacggaaggtggaagagattacgaggtgagtgtcgattttgacagcgcagggacaaaaaagatgtttgcatcttttgcaaaattacaaaaagtatagaaaaaataaaattgggaaaaatatatgaaatgttatagcaatcttcccttgttagtgttataataatggaagcgaaatccatttgaaaagtaaggaaatcggaaaggacgtggcaagtatgaacagagtagaagatattattgcagcatcaaaattaaatgacattttaaagaagaaagatgacaatgacaaaacaaagaatacagttctttgggtacttgcaattgtaggtgcagttgcagcaatcgcaggaatcgcttacgcagtatattgtttcttcacaccagattatctggaagattttgaagaagatttcgatgatgaatttgatgacgatttctttagtgaagaagacgagatctagaaagtgcaataaggcgggacaaaaagtcccgcctttttcttgcagaggaagtttttggagaacttgtaaggaaaacaatgtgcaaatgggaatatagagtggaacaattgattgttcaatagaacggtaagagaaaggaatacagatagatgaaaaaaggacaagtttatgaggggatgattcaaaaagtagaattcccaaataaaggaatcgtacaagtagatggggaagagaagcctgtcattgtaaaaaatgggattccggggcagaagatccggttttgtgtcaataagctgagaaaagggaaagcggaaggacgtctgttggaagtaatggaaaagtctgcattagagacaagagagccggtgtgcagtatttttccggcctgtggtggctgcatgtatcagaccatggattatcaggcacaggtgaagatgaaagcggaacagatccaatcgatcatggatgcggctgtggatgggtattcctatacctttgagggagtaaaagaaagcccgaaggaatttgcttaccgcaataaaatggagttctcctttggggatgaatacaaggacgggccgctttctctcggacttcacaagaaaggaagcacttacgatgtactgaccgcttctgactgtaaattagttcacgaagacatgacacagattttaagttgtgtgctggactatttcaaggagagaggtgtcagctactacaaaaaaatgcagcatatcggatatttgcgccatcttcttttaaggagaggagatacgaccggagaaattcttgtaaatcttgtcacaacaacacaggaagagcatgacttggctccgcttgtggaaaaacttctggcgcttccggtagaaggcaagattgtcgggattctgcatattttgaatgattccttatccgatgtggtgcagagtgatgagacaaagattctctatggacaagactatttctatgagaaaatcatggggttggaatttaaaatcacaccattttccttctttcagccaaattcaagaggagctgaggtgctttacagcactgtgcgggagtatatcggagatatccacgatatgaccgtgtatgatttgttcagcggaaccgggacaatcgcgcaagtattggcaccggtggcaaagcaagtgatcggagtcgagatcatcgaggaagctgtggaagcagcaaaagaaaatgcagagcggaatggactgcataattgcagatttattgcgggagatgtttttaaagtattagatgaaatagaagagaagccggatgtgattgtgttagacccacctagggatgggattcatccgaaagcattgccgaagatccttgattatggagtagaaaatatcgtgtatatttcctgcaaggctacaagcttggcaagagatttagaaatgatacaggcgagaggataccgggtggtgaaatgcacggcggtggatcaattttgtcagacggtccatgtggagacggttgttcttttgtcccaactgaaataaaagccggatgattacattaatgtcacgattgaacttgatgatatggatataacatctgcagagactaaggctacatatgatgagataaagaagtatgtggctgaacataatgccggcatgaaggtttccaatctgtatatctcacaggtaaagagaaaatgcggaattgaggttggaaagaattataatttacctaaaaatgaagatagcaggcaaccgcagtgtccagaagataaagagagtgcaattgtggaggcattgaagcattttaagatgaatagttaataaagagaggtgcagatgctatgccaggtatactcgtggttgaagatgatgaaaatttaaatcgtggaattacattttcactgaaaaaatccggatatgaggttttttcagcagaatcagtgaaaaaagcgaaaagaattgcaagtgataataatgtggatgttaccatttgtgatgtgaatcttccggatgggaatggactggaatttgtaaggtggatgagatgcaattataatacatacattatttgtcttacagcactagatcaggagatggatcaggtcatgggatatgaagcaggggcagatgattatattacaaagccgtttagtctttcggtacttcttttgaaaatagaagcacatttccgccgcagacaggagaaaacggaagccggaaagatgatttcgggagatatcgtatttatcgcaggagaaatgaaagtcctgataaagagtcgtgaaatcagtctgacaaaaacggagttgaaaatgctgactttttttcttcagaatccgaaacagattctttcaaaaacacaaatattggaaaatgtgtttgatctggaaggggattttgtggatgaaaatacaatcgctgtcaatatcagaagactccgtgagaaaatcgaagacaatccggctgcaccggtctatataaagaatatcagaggtcttgggtatatatggaatcaggaggtaaggcagtgacaaagagatatcgcaagaagattacagtagtgctctccttggtattacctgtcatattattgtttgcaatattaaattgctttaccacgtatgtgttttatgaagattataaatataaaatgaattttatgacagagattgctgcaaaggaagaattttccgggctggatgctgtttcggaattgcttaaggataaggatattgaaactaacgaacagggaaggcgattattggagcaatatggatactgggggaataaagggaatgcattttattcgcaattccggcatcaggttatggtgaccggtgctgtaagcactgtgatatgcgtgcttcttttgacttttttactttattggaagaaaaaagaagatgcgtgtcatcagaaaattttagaccagttggaagaaattctgatcagattccgtgaaaataaatttgatgatttactgaaaacggaaaatcatgcagaactggaaaaattgaatgaccagcttgaagcaatcggacatcatattcagttgataaaggaagaagcaagggcagaaaaggagaacacgaaagaaatggtttctgatatttctcaccagttaaagacaccggttgcagctttggatacatgttttagtgtgctgatgcagaatgacttaagtgccacagaacaggaggagtttcgtatccgttgtcggagtgctctggatggactggagacattattgcagtcgcttcttgaaatatctaagatggaaactgggctgattcagattaataagaaaaaacttccgcttatggatactgtcatatctgctgtgaaccgcacttatcctaaagcggatgagaaagaaattgaattcgtttttgactatgaaaaagagctggaaacatgcacgattatgcaggataaaaggtggcttggtgaagctgtgatcaacgttctggataatgcggtcaagtacagtccgtgtggttcaaaaatatttattcggttacaaaaaagaaacgatcttgtaagaatggaaattgaggatcagggaattggtattccgcagaatgagtatcacaaaatttttcaacgattttacagaggaagttccaggaaggtcatggaaaagagtggtacaggaatcggactttttctatcgagagaaattgtcgaaaagcacgcaggtatggttacggtaacctccggaaaaaagaaaaaaggaagcacgtttgtgattcaattaccatatgttagttaaattttaaatgagcagaaatcttacaattctgtaagacttctgctcgtttttgaaagtgaaatgaaagaatgtcctgatacaatttggatgtaggttgaaaaatgaccaaatatataaacaggcaaagaaagcgtgctgaaaaggtacgctttacagaattgaaaaggaggcaacacatgagtgtgatattagaaaccaagcagctttgtaagttttatggcgcaggtgagaatcaggtcaaagcggtcaatcaggtggacattcagattgagaagggagaatttgtcgcaattgttggaaagtcaggttccggtaaaagtacattacttcatatgcttggagggcttgataccccgacaaaaggcagtgttactttagcagggaaagatttatacaggatgaaggaagatgcccttgctgttttccgcagaagaaaaatcggatttgtttttcaggcatttaatctggtttcatctgttaatgtctgggaaaatattgtactgccactggggctggatggaagaaaagtggatgaagcgtatgtaaatgatattattgcaactttggggattgaaaaccggatttataatctgccaaatcagttatccggaggacagcagcagagagtagcaattgcaagagcactggtgaatcgtccggaaattatatttgcagatgagccgacaggaaatcttgattctaagaccagtgatgaggtaatcgctctgcttaagatgacagcaaaaaaatatggacagacaattgtaatgattacccatgatgacgaaattgcacaggtcgctgaccgtattctggtgattgaggacggacaggtggtggatttcagatgaagataataagcaggattgcatatagcaatgacaaaaggaacaggacaagaagtatactgatcatgatggcaatctgtctgaccacgatgctgcttgttatcatcagtactgtgggaaatggggtaattcatttacagaaaagtcaggcggcaggatcatatggaagcaattgtggtctgtttgtttccgcagacggatcgcagttaaaagaagtaaaccgccgtgcggaaatagatgctacaggcactatgtgcaccgaaggtatcataaaaggcaatgaaaaaggcgggtttgtctgcatggatgagactgcaagaaaaatgcttccttataataaagaatatgagttgaaggaaggaaagtatccggaaaaaatgcaggaaattgccgcaggaagagcattttttcgtgcaatggggtatggtgatgtaaagatcggagatacggttacactggattaccgcgcagggatgcagtcagaatataagccggaagaatttgttgtcagcggaatcctatatgatcgggatgagtataccatcgaggcatcttatgttgctttcgggtcgcaggagttttatgatgagcacgtcgcagagaatgacagacagtataatatttattttactttaaatgattctgcaaatgtatctatgaataatattgattcggttataaagcagattgcagcagcttgtgggatcgaagaaaaaaacgttatagtcaatgatctctatttgcaatgggtcttgcagccgagttatgaaacgattgcggtatgcggggttttgattcttgcaattgtacttttctctgttgtggtcatttataatatttttcaggtcggtattgccaacaagatacaggagtatggaaaaatcaaggctctgggagcgacaaaaaagcagatgaaacaactgatcttcagagagggtatgtttttgacaatttcttcaataccagttggattgcttcttggttttctgattgcaaaatgcggttttaactggctggtagaacagggaaaccttgtatcaaccggaactggctctatgggagtccaaaatcagcagatgccactgttttccctgcctgttatgcttctatgtattttcgtgtcattttttaccgttgctttggcgctgcgtaaaccaatgaaaattgtttcacggatttcacctatcgaagcaacacggtatttagaaaatgcagaaacacacaaaaaaggaaaacgaaatggcagaaaaaatgtcaccgtgttttctatggcaatggcaaatataacgggtaatccaaaaagaaccattggtaccatcctcacactggggctttcctgcgcattgtttgtgattatctctaattatgtaggaaatattgatacggagcatgaagcacgtctttccgttaatcatggacaatttgaactgcagcttgactattctgctgagtacgatgaaagatatccggagaataatctggatacgattctgacggataatccattgaatgattcaatgattgaagaaatcaaaagcattccaggagtgacagatgtcatgacgagagagattgtctctgtaaatctgaatggaacaagatttccggctgatattgtgagtaaaaatgattttgattttatgcgccaagacggggatattggctctatggactatgatcaggcggtaaagaatggtgaaattttctttggttggttgatgtggatggaacaagatggatatgctccgggtgaatccattgcatttgactttgagaatggaagtgaaacctatacctatcagggaaagattgcaggatcctttgtaagcgcggacacttatcttgtcattccggaaggtgtataccgttccatgaatccgaggggaacagcctatggctatctgtgggtggactgtgataaaaaagatgttgcatctgtggaacagagtctgaatactttgatttctaatacttcgcatataaaaatggatacctatcatgcacagttacaatctgcagaattcacagctcgcatgatgaagcttggctgttatctgtttatggcggttgtaggactcatcggttttatgaatatggcaaacaccataatcatgaatattacgacaaaaaagcaggaatatggtgtattacaggctgtgggtatgacaaataaacaattaaatttatgtctgcagttacagggaatgatgtttacggttggtaccatatgcgtagctttgatcattggtctgccgctcggctatgcacttttttcctatgcaaaacataatggaatatttggaatgaatatctatcatgttccaatcgtaccaatttttattatgatttttttggtcggtctgttgcagattgtactttcctgcgttttaagcagtaatctgaaaaaggaaacgctggtagaaagaataaggtatcagggatagcaagtaatatgtaatgaactaggtcttaacgaagaggagaaatagataacttccattttgtatgtatgataaatctaaacagtattttagcaacatttcctgagtgggggcagaaagtgcccccactttcactatttgggggcgaaaagcgccaccatatatcataaatgatgggttcaagggaaaaatcccttgctagaacagtatttggatggagacatctctaatgcgtatctagccgtcaacctaagaagtatcaaggcagccaaaacagcagattaatcatgcaacatgttctttccacaatggctggactggcattgcgggaaaatgatatcggttatgcgagatttttgtcagggaaggtacaggcagttgcacatacattggaaatgggaaaatataatgagtattcgccaatgcttgatattgtatgtgcagggaaagatgtagagggaacatataaggtggtaaaacatcttcttgataatgtgggtactatgtatgattttagaaagtccggtttatataagcatatgaagttcagagatattgatgaagctatattagatggtgtaaaagaaaaacttcttgaaggattcagaaatgaggaagaattcggctacatggcaggatatgaactgtgggagaaattaatttttgacagataagttttttgaaaactgtcgtttggtaaaatctattccatttttaaaagccttgcgataaaatatgttctgtgaaactattgtactgctacaaaaaacgatgtagaaagcttagaagctttttttaagtggattatatttataagcaaggttagtaatctgaaataaagaaataaaaaatgatatcaatagttgtagatatagagtatggtaaggcgttcagaaatgggcgcctatttgattgcccaaaatgaactttacaaaatatttatctaaaatttacattagtaaggtagataaagatagaaacggtgtgatattttgaaaaaaagagagtgattgttggaaggagataggtatatgtgtgaaacagctttggtacgaacaaatttaatgggagatgtagaaagaaaggctgttttatggttcaagtataacgaatagttttttgatggctctgtttctgtatggaacagagcctttttggaggtgctaagattgaaaacatatcatataggtgaaaaagtagtacattgtccagagagagtatgtgaagtagaagatatttgtcaaatagaaatgaataaaatgaaaaaatattattacaggctgaaaccgattcaaagtaaagtgaaagtagtatatattccgatagataaagtagagatgcatgtacgaccgctaaagacaaagaaagaattagaaaaaatcttttgcattgaaccggaagaacaactgatctgttacagaaatccacaaaaaagaatggatatacaaaatcaggctgtccgggaagatgatgcggtaatgttgattcagttgatcaagatgtatcgaagaaaacggcaaaaaaatcacatctcgctcggggatgcaagatggttgaaagaagcggagtgctatttgttttcagagatgtctgaagtgttagagtgtgattataattttttgttacagtgtgcacaatataatcagaaaatcgaatgtgcataacaagatagatatgagagtcattgattatatgaggaagataactatgagaaaaatatatgtaatggatacgaacattttgattcatgcacccgaggcaattttgaattttgaagataatgaagtagtgattccaatggcagtattggaagaacttgatggattaaaaaattctgagaaggaaaaggggagaaatgccagagaagcgattcgccacttggaaaattttcgggtacaaggcaatcttgtagcgggtgtagatacggagcagggaggaatcatccggatagaaaaaaattatgttgatatgcaacttccaacggatatgcctgaagataagatggacaatcggatattaaaggtatgtttgggacttcaaaaagattatccggaagaacagactattttggtcacaaaagatatgcttcttagaatcaaggcgcagatgctttctatcacagctcaggattatacaacagacagaatagcaaagaaagaagaacagtatagtggaaggatggaagtttatgtagaggaagagcattttaaagagctcaaaaagaaaggaatcaaaccggaatatatttatcaaatgggagaagatgggattcgtcatcaagtcatgccggagatgaatcagtttctgatcttaaaagcagatcaatctacgaaaaaagtacagcttggacgttttgatggaacaaaagtagttccattgcaatataaaaaaagtaaaccgtatggtgtgtccccaagaaatgtcggtcagtatttcctgcaggaagcattgatgacgatatcggttatcttccgggaacagaacaagagaaaatctcaccattaatgcgcccgattattgataatttagaacagttgatcgattctgatgaagaagagcggtataaaaatgaagaagaattgcatgcgaaaatcgatgagttatttgcaagaggattaattgaaacggaggcgatgaattttatccgaggcagatcctttgtaaatacatatctggatgagcagacaaatggattgagttatgcgtcggagcatatgaagaaaagtccattctgttatcaaatcacattcaatgcagaagaatgtgaacggtcagaattagctatggatgcaatacaaagaatgtagaaagacagaggcaaaaaattgaatttaacgtatcgggacataagggaaaacaaagaaattaatcagtatattacaatgggaaatgaaatactgggggttcttggctatacagatcattcgcagagacatgctgtgattgtagctgaacgggcagcagagctgttagaagtattgggctactcaaaaagagagatagaattgtgtaaaattgcaggatttatgcatgatatagggaattgtgtgaatcgctcggatcacgcacacagtggagcaattatggcaatgcagatcctaaggagtcttggaatggatgcagaagatatttcagttgtgatttctgcaattggaaaccatgatgaagaaactggaactgcggtaaatgcagtgtcagcagcaattattttggcagacaaaaccgatgtacgcagaaaccgcgtacggaataaaaagaaatcaagttttgacattcatgaccgggtgaactatggtgtgctttcaacagaacttgcagcgaaccctgagaaaaaagagatacatttgaatttaaaattggatgaagaaacatgttctattttagactattttgaaattttcacagaacgaatgttgatgtgcaggagagcttcggagatgctggggatgcattttaagtttacagtcaatgaaagaaaagtattgtgatttgcaatacctgtatgttctcatttgtggaaaaattttatatagaaggagaaatatagatgaaacaggcgattatggatattggctcgaattccatgagggttactgtctatgaggttgacggaacagtgttccgtattcttttcaaggaaaaaattatggcaggattggcagggtatgtagaaaataaaaaattatctccggaaggaattgaatgtgcatataccggccttttagaatttagagaaattctagaatcattaaatatcaatcatgttgcagtatttgcgacggcatctcttcggaacattcaaaatactgcggaggctgtatcggcaattaaagcgaggacaggatacgatgtggaagtgatcagtggaaaagaagaagcattttttgggtatacaggggccatgcaggatgtaaagttatcaagcggtgcatttatcgatattggtggagcaagcacagaagttgttccctttgaaaacggagaggtactggatgctgcaagttttcctgttggttccctgagcctgtataaagagtgtgtgaaacatatcgtgcctggggaggggtcgctgaaaagattaaaaaaatcgatatctgctgaaattggaaagcaaaagatgtttacctataaaaagtgttccccgctagtttgtgttggtggaactgcaagggcagttttgcggatcgcaaagaaattatatgctcttccaccagaatgtcatacggtttccagaaagcagttggatcagttatgttctcagctgtatcaagcggacaggagagcgatcgatcttattttaaagctggagccgaatcgtattcacacgatcattccagggattatgattctgcagcatatcttccgtttgtttgctgccgatgaaattgtagtcagcaattacggtgtaagagaaggatatttatgcaagaggatcattgcaccacaaaagaaaaaataaggaaaagaataggagaaaaagtgatgaggaagaatgtaagtctaccatatgtaaatagagagttatcatggctgaagttcaatgaaagagtattggaggaggcagaggataagtctgtgccattatgtgagcgcctgacatttttatcgatatttcagagcaatctggatgaatttataagagtacgcgttggaagtctggcagatcagatggcattgcagccgaccttgaaagataataaaacaaatatgacagcggaagaacagttaaaagctgtattggatgatatgaaaaaactactccaaagaaaagattatacatatacacttctgaggaatgaactgaaagcagaaaatattagcattgtagatttcaatatgttgtcgaaaaaagaatccgattatttagaacgatattttgattcagaaatagctccattgatttcaccgatgttaatatcaaagaacgcaccttttccgttcctgaaaaataatgatatttatgtggctgtactgcttggaaaaaagaataaaaaggataaggtaggaattattccttgcagcaacaatgtgtttccacgcttgattaagagtccgtttcgagaaggaacctacatgcttacagaagaattgattttgcatttcgtagaaaaagtatatccacattatattgtgaagtcaaaaacacttttgaaaattacaagaagtgcggatattgatgcggcggatttgtatgacgatgatttagattatcgtgatattatgtcagaattgatcagtaaaaggaaaaaactaagtccactgacgatgagtatgacacgaaatgtagatgaaaaagttgtagatacattatgtgaaaatctcggtttgcaaaagaaaagggtattttacagcgcttcgccattggattttaaatatgtatttcaaattcaggatgcgcttcgcaaaaaggaagaattgttttttcagaaacgagtgccgcagccaagcgcaatgttcgatatgaaaaaaagcatcatagagcagatcttggagaaagacagaatgttatcgtttccatttgaaagtatccggccatatatcgaatttttaagagaagcagcaaatgatccggaagtattatcgattaaaatcacattgtacagggtcgccaaaaattcaaaaattgtagaaacattggtggaagcagcagaaaatggaaaagaagtgaccgtattggtagaacttcgtgcgcgctttgatgaagaaaataatatagagtggtcgagaagactggaatatgcagggtgtaatgtgatttatggattacctgggtataaagtacactcgaaattgtgtctggtgacacgaaagcatcatgatgaaattcagtatctgacgcaggttggaacaggaaactataatgagaaaacagcagaactttatacggatttgatggttatgacagcgaatccgcagattggtgaaaatgcaagacaagtatttcaggcgttggtgatgggagaagtcgtagaacagtcagaaaaacttcttgtggcaccgaaatgtcttcaaaatcgagtgctggaaatgatagacgaagaaattgctcatgccagacaaaatgagaaggcatatattggattcaaaatgaattctttgacagataaaaagattattgataagttaatcgaagcatctcaggcaggagtaaaaattgatatggtcgttcgtgggatttgctgtctggcagcagggattccgggatacacagaaaatatcgagataagaagcattgttggacgttatctggaacattctagaatatatatatttggcatagaggaaagaagaaaaatatatattgcatcggcagattttatgactagaaatacggtgaaacgtgtggaagttgcaataccgatagagtcagaagagttaaaggtccggatagaagagatgtttattacgatgctgtcggataataaaaaggcaagaaagatgaagccaaatggattgtatgagaaattgccaatagacggtacagaggtcaatgtacaagagttgctttttgaacagtcttatttgcagcaataaaatattaaagtaaattttattaatatcaaagaatatatatggaaataggataaaagacggcgcatagttgtgcaagcttttatcctgtttttatttaaaagcatgtattttaatgatgacatattgacaaaattctatataagatgtattctgtaaacatagaaaataatcaatgtgtgatgagaggagggagtgcatgggaatagattacatagaatatgcaaagattttcaaagtattttcggatccgaaacgtctgaagatcatcaatatgctgtccaacggtgagctttgtgcgtgtaagattctagaggaatttcagatcacacaaccaacattatcgcatgatatgaagctcctgacagatatggagctggtcgttccgagaaaagaaggaaagtggacacattattctttaaacagagagaagatgaacgagatatacaaaacagtcgggaaactgatgatccccgatgggttttcaaacatcgtggattgtgactgcgaaaaggacagatgacaggaggcagaaagccggatcacaagcgaaaaagattttgtatcatacaaggagggagattatgtatagagcagacacgaaattatatgttttgacaggatttttaggatcagggaaaacaacagtgctgttaaagcttttggagatattgaaaggacatcggattgggattatccagaatgaatttgggaagctgggaatcgacggcaccattttacgaaatgacgagattcagatggtggagataaaccgaggatcgatcttctgttcctgcctgaagctgaattttgtgcaggcgttggctgagatggcggcacaggattttgagtatttgttcgtggagagttccggatggggggatccttcgaatgtgcaggagattttggaggcagctaagatcgtatctggaaaagaatatgatttcagaggagtgatctgttttgtggatgcggtaaattttctagaacaggtcaaagaggaagagactgcttttcgccagttaaaacactgtcacctagcagtgatcacaaagacggatcttgtcggtgaaaaacagattgagaaggtcgaggagaaaatcagagaaatcaatccggtctgcgaaatgaagacaagtgctaacgggcagatagatgattcttttttaaagaaagatctgctgatctatgagtgggcagaaggtgaagagacgacgaattccgtagaaacaaaaccaaaatctatatttatggagtatgacgggcaaattgatcggcaaaagctgaatgaatttttaactgtgatcgcaccggatgtccatcgcgtgaaaggattttgcaatttgacggaaaccgggtggacgcaggtggatgtagtaggaacactgatagattataaagaatcggaggcatttgaaaagtcacagttagtgtttatttccaaaataggaccgatgattatcaagaagattctttcagcatggcaggaacacgtaggaactgaaatgaagttgagaaattaaaggagaaagcgcatgaagattaaagtgattggtgcaggatgtgaaacttgtgataaattgtatgagcatgtgcgggaagccgtagcggagaccggatgtgacgcagaagtagaaaaagtggaagatctattggaaattgtaaagctcggagtcatgtcggctccttcgctcatgattgacgggaagttagttgtgtctgggcgaatggctaaaaaagatgaaattatacgatttttaaaataaaatagaggtggtcaatgcagcagaaacttcgtttgtgctgcaagtgacacatttcttttgagaatatatcgatatatttaaatgtatgaataggagagggctatatggaatttgtgaaagaaatatgggaatttattcaaaatcaagtacttggcatgcagtggctcagggaactgattgggaatggacttgcggtggcaggtcttgacctttcatcaagggcaggtggaagcatcttattctttctgtatgatctgatcaaaattgcgatcttgctgtgtctgctgatttttgtcatttcctatattcaaagttattttccaccggaaagaagcaaaaaaattttggggcgttttcatggaatcggggcaaatatggtcgctgcacttttaggaactgtcactccgttttgctcctgctcttcgattccgctatttatgggattcacaagcgcagggctgcctcttggtgtgacattttctttcttgatttcttccccgatggtcgatcttgggagtcttgttcttcttatgagcatctttggaggaaaggtggctgttgtatatgtagtgctgggaatcatggtggcggtgctcggaggaacgatcattgaaaaattacatatggaaaaatatgtagaggaatttattagaaatgcatctggcatagagatagaagcgccgaaactgacaaaaaaggatcgactactgtatgcaaagacacaagtagaaacgacctttcggaaggtatttccatatattttggtcggagtcggaatcggagctgtgatccacaactggattccggaacaatggattgaaaaaattctcggaaatgacaatccgtttggagtgattctggcagttctggtgggagttccgatgtatgcagatatttttggaacgataccggtagcagaagcgcttctttcaaagggagcacagcttggaacaattttaagttttatgatggctgtgacaacgttaagtctgccgtctatgatcatgctgcgaaaagcagtcaaaccaaaattgctggcagcatttgcaacaatctgtacgactggaatcgtgatggtgggatacttgtttaatttgtttcagtctgtatttttataagagaaggagaagagaatgaggaagcaaacctatgagagaaaaccaaaagtggcatttgtatgtgtacacaattcctgtcggagccagatggcagaagcacttgggaaactgctggcatctgacgtatttgaaagttattctgcgggtacaaaattaaaaaaacagatcaatccggatgcagtcaggcttatgaaacagatatatgggattgatatggaagaggcgcagtacaataaactgttgtcagacattccaaaaccggacgtagtgatcactatgggatgtaacgtaacatgtccgtgtgttccggggcagtatacagaagactggggactggaagatccgacgggaaaagaggatgaagaatttttgaaagtgataaacagcatcgaggagaaggtacgaaagttgaaagaaacattgcgaggggatacttcttacagttggacatagatatgcttataaaacaggatattttttatgtattcggtaggaaaaattttgaaaaagaatgaattttcctcttttttctgctatgataaaaggaaatggcagatgaaaaatctagaatgatatttgtagcagaaaagagaggaaggatacgatgcaaaatcaagaaaaagaagaaagggagaggtggctctggctgttacttgtcggaattggaatgttttttacagacagattgctggcatgggcggtgtatagtatccgtttgctgtatttagtaccgcttcttgtatcgggagtctatttcttgtatttgtgtattcaaataagcagacacaaatttgaccggagaaaatgcaaccagcttgaggtttggatgatggaggcaaaacgatggatgttatcaggattttggttatcatgtgcctcgtttctggagacgttgtttttagatatgacaaagtttctcagtgtggatatggcaaatgcatttcatagaagtatcacattttatttttgggtattgttgtggattggatattttttaggatttttttcaggtcggatcagagagaagtacatgaaacgccatccaaagaaagagatgtcccgtagaaagaaaattctgcttcttctaggaattgcggctgtggtcataattgcatttacattgaggtgcctcggagatctgatggtgatttttcagggagcaggagtgatggctgtgattctattctggtattccggatatgaggaaggacagcggtttcggtatgaacgaagaaggctggggatatatggtgttgtattactggcaatctttgtggtgctattgctggcggttccaaaagaatgcatggagtttcctcacatagcttggtaagaatataagaagaaagaaaatttcaaagagtattcttcttggagggtttcatgcttcgtagagatgaaaaattgtgaaaaaatgctaagtgcgcctgtaaaatcttgtttgattttgcagacgcactgtttgtatatagaaaaatatgtatagtggcgaaaagatttttatagagtaaatacaaatttatcgcttcggtagatagtcctcgcaatctccagtatgcgtccggttgactgatctacacatttagaactcatgacaaggcaggaggcaaagcctttgatatcaaagagggcgcgctcctttttatcaagagcagagacagaaaattcataattttcgtcggtaaaatcattgtaaccacactcgtgcatgtaatcgcgaagggatgtgatggaaagtccccgctgtgccagatctggaaatgcataatccggaagatagctgacgcggattgcgaccggttcatcgtcgacaaagcgaagaagagtcagtttataaatatcatgaaaatccatttctttttcagagagctgaaacatctcagagacaatcagattgtccttgatcagctcaaaaccgacattttctgtgcggtagtggattccaatggaattcatcttttcaagaaaactctgactgtcatttaagagcagtcgaatcttttctttctttccagagaaaaagcttccgtagccttgcagagagtggatgtagcctttttcttctaagtgaagatatgctttccggacttctgtgcgggttgtatcaaagcggaccgccatcttgctttcgcttggcattttttctccttttttatatccgtcatgttcaagttcctgaatcaaagtatcaacaatcgtttcccaggttgtagttgttttcatagagaactcctcctttttcgaaaagtaaagactattctttcattataacaatttatgaaaaagaaacaagatgttagtgatggattcacgaaaatttcataaattttactttctctattgactcgcacctgctgttttgtagtaaaatagataaaagaaaataattttttatacaacaataggagaggaagcagaaagatgagagaacaaaaaatactggttgcatatttttcacataaaggagagaattattctaacgggagcattgtcaatctggacaagggaaatactgaaatcgcagcggagatgatcgcagcacataagcatgcagagttgtttgaaattgagtcagagacaggatatccttttgcgtatagagcatgtgtagaagtttccaaaaaggaattgtctgaggatgcaagaccgaagcttaaggaagaaaaatccatttctgcctatgatacaatatatattggctacccaaactggtgcggaacaatgccgatgccagtctggacttttttggagaacaatgattttacaggaaagacgatttatccattctgcacaaatgaaggaagcaagatgggaagaagtgaggaagatatcaaacggcttgcagccggggcagagatcaaagaaggacttccgatccacggttcttctgtcaaagaggagcgggagcagattatccggtgggcggatcaatagagaggatatgccatgaaacagtggaagcacatctgcttgaaatggaatgaatttattaaaagaatcttgagaaaggaaagtatttttaagcgtctgaatctttcttttctcggattgttgcttggggcagcggcatttatcactttttttagttttgacaagtattcaaaagagattatctggaatctgaagcagaatgcggcgatgcaggtgcaaaacatctgtttgaagatggaagatattatgcgggaatatgaagatgttgcgcttcagttttatgatgatgcaagagtcttgcaggctgctgtggaaaatgccgaggcggatcagaacggtgagaagggaaaagaagacaacattgcgctgatcgaggagaagctgtatactatgagccgtcagagaaaacatatcaaaaatgtacagtttgtgacacccgggagacagtatcatatgatggaggaaaatggatatcgcaggggaggaacgataaggaatctgacagagttttataataagacatattatcaggagccgcaggaaaaacatggatatccggtttggtttgaggatgcaggacaaagtgagacgttttatgaaaacgagcagagtgtgtatggatttggaagtatagtgacactgggggttgctgtttatgatccatatacgagagaatttctaggggttctttttattaatatcaatatagaagcttttgaagcggcagcagatggatatgagggaggtccggaaggcaacatgtttcttaccggaaaggacagcgtggttcaggggtttgccccaagtatctatgcgccgtcttttccgaagaataagacgatttttgaggatatgaaagaaaaacagaaagattccgtgagaaaaagaatcgaggaaagagatgtcctgtttgcctatgaaaacataccggggacagatatgtctgttgtgtatctgggaaatatggacagactcctggaggggacttatcagacgagaaatgtctgtatttttgtgttgatctgtgtggtacttgcatgctttgccgtttcttattatgtcacatgcagtatttctgatcccatccgtcaattgatcaaggtgatggataaagcgggaaagggaaagtggacggtgcgttatccaatcagtggaaatgatgagatcactgtgctgggagaacggtttaatgatatggcagacaggacaaaccagttgatcgaacaggtatacctgtctgagatccgacggcagaagcttcagcttagctggaaaaatgcgcagttagatgcgatgctgatgcagatcaatccccattttttgtacaatacacttgacattattcgttgggaggcgatgtatgaggcaaacggagagagcagagtgacgaggatgattgagcagtttagcaaactctgccggatgggaatgcgcacaggcggaaatacaatcccgctgtcagaaggattggaacatgcgaatgtatatctggaagtgatcaatttccgtcatcaggataagatcgaattaagtgtcagcataaaaccggatgtaagagattgttatattccacagtttatgcttcagccgatcatggaaaatgcagtggtccatggatttaatgatgcagcaaaaggatgtcagattgaaatccttgtgacaaattgggaagaaaaattaaaaattgtagtgaaagataacggaaaaggaatgacagaagaagaacagaaacaattgcagaaacagattgatgaggagattcagtctggtaaaaatatcggaatggcaaatgtcaatcagaggatccgtctgttctatggagaagagtatggaatccagatggaaagcagacagggagagggaacagaggtagaaatcatccttccgatccgaaaatattctgaaaatatgaaaaatctgtccggagaggagaaggaagatgatctatcaggttctgattgtagatgatgaagagattgtgtgccgcggaatggcacagtttgtgaagtggaaggaacatggatttgaagtggcggcaattgctacaagcgtagacgaagcgcttttgatcctcagaaaaatgcatattgatgtagtgtttacggatatccggatgccggagaagtcggggattgatctgttaagagaaatcagagaacagaagtttgatacacagtgtgtaatcttaagcggatacagtgattttgattatgcaaaggaagcaatgcgttacggcgcagtggagtatctgacgaaaccggtgaatctgcgggaagtcgaacagttccttgataggatgcggacaaagctcaataaactagtggaagaaaggcttgatcatacaagacagatggaaggtttgctgttgtcaatcgcgagaggatatgccagtgctgatatagagaaatatggacttccagaattggaaaactggtatggggtatccatttttatgacagagaggacagcagataccgatgaggttcaagtacagaaaaaattgatgaaggatcggattctggcggtgatcccggagaccattgtactagatagtgggaaccgatcgctttttgcagtgattccgtttcaaacaaaagagcagctgaattattttgtgtcagtgtcagagcaggtatgcagtgaagaaaagcactgggcgcttgcggtcagcaaggaaaagaaagggatttacggactttcagaggcctggaaagagacagagagcgcaatgagataccttctggcagacacgaagaaaaatattatcttctataaaaatattgagacgctctacgcggaggaggcggtggaggtgccaaaactgatcacagcctttttacagaagttacatacaccggaagagcgtagcgatgcggcaaaatggatggagaagatgttaaaagagctcgagaaggaaaagcagatggatgtgctgaaactgcagaccatatgtatccggatcgtcatagaagtcaatggatatttaaaggaaatcgggatggaggagtccagtctgcatgatcgcttaaatgaggcgctaaaacagttgctgctctgtgcagagggacaggaggtgcttcgctatatggaatcttatctggaatggatcatggaatgcatcggacaggcagatcatcaaaatgtaggaggcggagtcatctctgaaatgcagagctttatccgacagcattacaatgaaaatatcagcctgaatatgctcgcagagcagttttatatgcacccaaactatttgagccgtctgttcaaagaaaaaactggagaaaattttgtggaatatttgacggaggtgcgcatgcagaaggcgcaggaattgttgagagattcggaatataagatcattgagatatgcgggatggtcggatatgacaatccgaggtcttttagcaaagcatttaagcactttaccgggatgacaccaagagagtgcagagaacgctagaaacagcatagttgcagaaaaaagagtgtgtgtggatttttccaaagaaaaaagtcctgccaaacggtggttactgtttgacaggacttttttgattattttttatttgcttcgttgaatttttccaatgcttctttttcacagaggctctgtgcttctgagaattctttttccgggtctgcacttggatctgtcagaatcttttgtacagctttgtcaacataagttccaaagtctgcttttccgtagaattccagacgtccgatggattttgcagattcaagcacttctgcgtattcttccgggaattcatagaagtctgtaatactcatgtcatctctaggaatgatcaccgggtttggagcacctttagttgcaaggttttcaaagtaagaagagcggtattcctttccggtcatatagctgatgtattcccatgcagcatctttttttgcctgatctgtttttgcattgatcacatagcagtctcctgcgattgcagttgtctgttcgccggaaggtcctactggtggaaggcaaagtccgatatcatctggatcgattccatttgtgatcgcctcagacacccagtctcctgcaaacggcatcataccgatttttcccataccaaagtttttcacaaggtcattgaattttaaagtaagatcgctttggagaactccttcactctttaatttttgataatattcagcagcctggatgacagctggatctgtgaaagtaagttcggcagttccgtcttcattttcctttgtgagatctccgcctgcctgccatacataatactggaagaaccattctgtccattcagcggcaagtgttgcatatccggttacctgattgtctggatcgttgatcttcttagctgcctcaagagcttcgtcccatgtttttggtggttcgttgatcccagcttcttcaaataaagtcttattataagcaaaaagcattggtgctacaaggttaggaatgccgtagacatttccgtcttttgtgaacatatcgacatattcttttgtaaagtcaccccattcatcccactcatctgtatatttgttcagaggctctaagattccggcggacatataggagtccatcattgtaaaggaacagtttaccagatccggtgcagttccagatgcgactgcctgataaaattcatttccaggatcaccttctttgacaactttattcaaagtgatatccgggtgttcctcaagaaattttttctccatagaagtgtaccagtcatctttgttacggcttgtgtcccagatagtaagctcaaccttccctttgctgctttctttgtctttgcttccggatgtatctgctttatttccatcagatccgccgcaacctgcaagagaagcggcagccatagaaaggcagagaacagaagcgatcagtttcttcttcataatcaagtcctcctttgacttcgttttgttgatggatttatcataacagatttgcagggaaaaagaaacgaaccagaactaacgaaaaacgtcacattttttaagatatggacgaatttgacagcgggcaggaaaaaaggtgcgggaagactttaagaacggtgacatcgtcgttaggttcagacattctattttagacaaaataacgatatacttttagggagaaaacacaagggaggtaatactgatgaaaaaaagtccgcagaaaaaaaacagagcaggcagttatcagtttcgaaaaaaagtgacgccttggtgtattttgttcattccgatggcgtgcacagtatggctgaaatattatccgattttcagtgcatttttcatttcattatttaactacgatccaatcaaccagccagggaaatttgttggtttccagaattatgtagatattttccagatgcagggatactgggattcctggaagaatacatttattctgctcgcattacagctgtgtatgtgctttttgatcccactgatccaggcgcttcttttaaatgagttggtgcggttgaagaaatgtctgacgacactttatattctcccggcattgattccgacttctgtaaacgtaattatatggaaatggatctggcatccggactacggtgtggcaaaccagatcgtgaagttttttggaggtcagccgcagacatggctcagtgatccaaatctggtcaaattttgtatcatctttccgggagtgctcggaggtggattgacagtgttgctttacctgtcagcaatccagggagtttccacggatattatggagtcggcggcgcttgatggatgtaccggatttggaagaatcatacatattatattaccgaacatttcctttatggtatttatccagctgatcatgtgtgtgatcactacgatgcagcttttggatgtaccttatatgtatgcttcaggaggtccaagtggggcatcgactacacagggaatcttcatttacaatgcattcaatcaagatctgaattatggcagaggttctgcggcttctgtgatcctgttgctcgtgatcgcagcaatgacgatgatccagatgcgttttgaaaaaatggagaaggagtaggaggcagagaagatgaagaaaacaaagcatagaacaaaaatgaagcttggaaaatctgagcgcgggctgaaaattgttgcagtagtcgtgtcactgatctttgcggcagcgatgttgtatccgatgatttttgcagtttccagcgcgatgaaagataacaaaaaaatatacgagataccgccgaaactgcttccggatgcagcaaatagcttatcggtcgtgttagattattctgaggtcaaaggagacgagaaggaattaaaggacaaaatgctgcaggataatattgtgaccatgtttggagtcagccagaagatgcaggaagattctattatggaaattaaagtgtacggagtgaaagacggagagacggtattttactcgagagcacaccagatgaaactgcagatggaaaaggattatggaatttataaaggaactgcgatcaagacaaaagtacttctccacggggatcgctacatccgtgcatgtgattccattggctatgaatttgatatgaacggagtgtctgaaaaagcaccggaaggacttgggacaaagttctctgagaaagtcgcaaagatcatggacgaaaaatatcagacaaccggagagcttgtaagcgttggtgacaaagtgaaaaattttctgaatctggagagctttaaatactacttacagatgccggcatatatttatccagaaagtgaagcagtacaaaactttggatttatgacatttgtatttaatagtatcatcgtcatcggattcgcaatggtttcacaggtgatcttgtgttcggtatgtgcatttgtcatcagcaggaaactttccaagagagcaggacagtttgtactgttattcttcctcggtggaatgatggtgccatttgcaagcattatgcttccacagttgatcatgtatagagaaatgggagcttacaacaactatgcagcgttgctccttccgttcttgtacccgtatggattttatgtgtacctgtacaaaggattttttgatcagattccgggaagttattttgaggcggcagagcttgacggcgcgggaagcttttacctctatacaagaatctgtatgccactgtctaagccaatcatttcgctcattgcgctgcagacctttattgggaactggaatgatttcttctgggcatggctggtcacagaagatcagaaactttggacattaaacgtggcactgtataatatttctaacaacgtagcgacaaaacaaaatgcgctgatgggacttgcggtcgtgacgatcacgccagtgatcctgctttcgattttgttctcaaaacagttaaaacaaagtattgtcgcatctggtgtgaaaggataatagttctagtattttcgtatgagaaaggggacgtcatatgtataagaaaagaagtgaattcaagaaaattgcagcgatcgctgtgggagcttgtggaattgcatatggatttggaggagcagaagtgcaggcagcgccgccggaaggaggaaactggacgttgcttccggcttcttccgatgagtttgatggagactgtctggatgagaacaaatggacaaacggaatctggtatgatgtcacaacagatcttgcgttttgtccggaaaatgtatctgtgcgagatggaaatcttgtactcacagcgaaaaagcaggactataacggaaaggcttatacggcaggagcggtggaatcaaaattcgatgttccgggaactgcaagctatgtagaagtacgtgcgaaagcattagacaaaaaggcgaatgtactcagtgcaatctggatgcagtcttccccattgagctttgagctgaatccgaatccggaaattgatattatggaaacatttgattatacaaaaatgacaagtacgattcatacgtggaaccagagtccgtctctccatctgcagagaggtacaaatgggtggaagactggcctggaagatatcagtgcagactatcatacctatgcccttgagcggagagagggaaagatgaggttctattttgacggacagcttgcatgggagaagacaagcagagaggattcttttgtagaactttcccgccacatggtgctcagtttggagggacatctaggtacgccagaggaacagtatcttccgggagaatttctcgtagattatgtaagaacttactatgacagtgattttgcagggcttccggaaagtggaacctatcagatcgtcaatcaggaaagcaaaaaagtgctggatctttccggcgatcagaaaggaattcagttgagacaatcttcggcagagagtggaagtgacagtaccaagtggacattgatgcagaatgcagatcagacatggagtatacagaatatggcagatggaacctatgtggatctgactgcggattccggagtgacatcaaatgggaatccggtcgtggcatatccttatcatggaggaactaatcagagatggtatctggttccaacagagagcgggacatggaaactgatgtcggcgcttagtggaaaagcattgtgtgtagaaaatgcttctttggaagaaggtgcaccgattgtccagtggagttatgagaaaaacgagaatgcaaacgatgagtggacgtttgtgcctgttcagtaaaaggcaaaaaattgagacagataaggagcaggaaagggaaaaacatgggtaagaaatatcagggtgtcctgacagaaaaggaagaatttttatatccggacagtgtctctgagacactgccggagtccattcgggtggtaatgccgaaaaatggaaagcaggggattcagcttttgctggatacgacaggcgatgagatccagatggatttcgaaggtgatggattttatgcagagtggtatgaaatgattgcagtgccggtggaatacaataccggagatggggaaaatcaaggcggagcgatggtacttgtggaggagcagaaagaaacaccggcttatgcaacaagaaaggcgccgtttttcgtctatgattgcctgaaagaacagcagaccgggaagattccagcgagggaaagtgaaaatgacagaagagcggcagtttacttttgcatctgtccggagaaagagctggaagcaggagaatattccgtcatggtgacggcaaagatggcagaaggaatctatcagcttcgagtcactgtgcagatctatgatgtgaggataccggaaaatacattttgggtcacgaactggttttccgaggaggcaatctgccgtttccatggggtggaaaaaggttcggaagagtatttgcaaatgcttcgaaaatatattcagacgatgcggcggatgcaccagaatgtgttttttattcagttggatgagaagtgtgtgactgcaagaaagccgtatcagtttgattttgaatatctgacaccagagattgaagcgttttttgaagcgggaatgcagtatatggaacttggagtgctgcttgatcgagggaaaaagtcggatggcatgccggatatgtatacagaacattttacatgtgcgatggcgaaagatgttccatttgagacactggaagggtatgaactgactgtgacctttgtaaaaagtcttgcaaactatctgacaaaacatggatgggagaaacgagtattgttccatatccacgatgaaccagacattcattatcagacgcaggaagtattggaagcacgcaagagacagtattatcttgcagccggaattttaagaaaatatattccggggatccggatcattgaagcagtggattcggcagaattcagaggtggaattgatatctgggttccgggtactgccggatatgagaagaaaaaggaagagtttgacacattgatccgtcttggagaaactgtatggacgtatgtctgctgtggaccggaaggacattggctgaacagatttctcgattttgcattgctcaaaggcagaatgctgttctggggatgcgcaaaaaatcggatttccggattccttcactggggactgaatcaatttccaggggagatgaatccctatgagggaacgagttgcccgaaccatacgggaatcggcacgaattttccatgtggagattctttcctgatctatcctggaaaggaaggaccaaggatgggaatgcgtctggaggcacagcggcgtggtgcagaagatgctgcattgtggcagatgttaaggaaagtggatgaaacagctcatgacagactgctgggaagcgtttttacaaataattatacatacaaagatagtccggagttgtttgccaaagtgtatgaggaactacttagtgcacttcagaatgcaaaacagaaaaatacagatgaaagatccaaaggataatggagctgaaaatatgtaaaatatgaaaaaggaacattgacaactgcatggcgtattttttataatgaagataaaaaagaaacagcattcatgcttacagagcgcgtccggatatccgggtacgctctaagttgctgtatgggtgaaaaaatcagagctattttgcctgtcgaaacctgtcgtaagaaggtttgaaaagcacgtttgtaagcgaatggaaggagaaaactacaaatgaaaacagaaaagaagtacgcatctgtatttgagctgaacggtgttcctaaattgacacaggcgtttccgcttgcacttcagcacgtagtagcgatgatcgtagggtgtgtgacaccagccatcgtgattgcagagatggcagggctaaatgagggtgacaaagtaatctttgtccaggcagcattgttcatcgcggcggtttccacactgattcagctgttcccgcttggaggcagaatcggttcaggacttccggtgattatgggggtgagttttgcttatctgccaagtatgcaggcgatcgttggtaattttgatattgctacgattcttggagcacagttgattggaggagttgtggcgatctttgttggaatctttgtgacaaaattaaggaagttgttcccgcctttgatcaccggaacggttgtctttacaatcggtctgtcgctctatccgactgcagtgaaatacatggcgggcggacagtcttccccaaactatggggcatggcagaactggcttgtggcatttcttacactggctgtggttgtagcacttaatcattttgcaaaaggaatcctgaagctggcatccattctgatcggaatgattgtcggatatatcatatccggattttttggtatgattgatttttcagcagtgcagggtgcagggatttttcagattccaagaccgatgtattttggaatgaaatttgaaacgtcggcagttatgactctggtgattcttttcattattaactcagtgcaggccatcggagatctttctgccacaagtgggggaggattggacagagaacctacagacaaggagctttcagggggaatcattggatatggaattacgaatattttaggttctttctttggagggttgccaactgcgacgttcagccagaatgttggaatcgtggcaacaacaaaggtagtaaaccgtgtagtgttaggacttgcagcagggattatcctgctggcaggatttgttccaaagttctcggcgcttcttacaacgattccgcagtgtgtacttggaggagcgaccatttcggtatttgcgtccatcgccatgaccggaatcaagttagtggtacagcagccgctgacctatcgcaatacttcgatcgtaggactttcggttgcactcggtatgggaatcacacagtgttcggatgcactggcacagcttccggcatgggtcacaacagtatttggaaaatctccggttgttgtgacgacaatcgctgctattttattaaatgtgatcttgccgaaagataaggaagcgggcaaataaatgatagtttttcaaaaaaggactgattctgctttcttaaataactgaacagataaaactgtaaggacaccgtttggtgtccttagttttacatttgtttttggacagaaagaaaaaatacttgaaatataccctgcaagggtatatactgctagtgtaaaggtacagctaagtacttttatcaatgcctatgagaaaggaaaaagataatggttaaaagtgtggacttcagtgggaaaggagatatcatgatggaagaaaacaaagaatgtagtcataaaaagaaagaacgtgcagagaaggaatatcgtgacctgatcaatcggttaagcagaattgaaggacaggtacggggaatcaagcgaatggtagaggaagatgtctactgtacagatattttgattcaagtatcggcagtcaacgcagcgctgaatagttttaacaaagtgcttcttgcaaatcatatccgcagttgtgtggcggaagatatcagagaaggaaaagaagagacgattgatgagcttgtaggggtactgcagaagcttatgaagtaggagggcagagaatggaacaatacacggtcacaggaatgagctgtgcagcgtgcagtgcgcgggtagagaaggcagtggcgaacgtacccggagtaacagcgtgttcggtgagtcttttgacaaactccatgggagtggaaggaagtgcagatccggctgctgtgattgcggcggtggagacagcaggatatggcgcagcaacaaagaacgggaaacagcaagatggcaaagagggagcaaatgggatagcgaaaaacaaggaggaagaactgctgaaagacagggaaactcctgttttaaagagaaggttgattgcatccttaggatttcttgtagtgctgatgtacttttcgatggggcatatgatgtggggatggccggttccgaaaatactggcagagaatcatgtggcgatgggattgctccagatgctgcttacgattgcggtcatgattgtcaatcagaagttttttgtcagtggattcaaaggattgtggcatctggctccgaatatggacacacttgtggcactcggctccggtgcttcatttgtgtatagtacctatgcactctttgcgatgacagaggcacagcttcgtggagatatggagcaggtgatggggtacatgcatgaattttactttgagtcagccgcaatgatcctggcgctcatcacagtcggaaagatgcttgaggccagatccaaagggaagactacagatgcactcaaagggttgatgcgccttgcaccgaaacatgcagttgtgctgcgcaacggaacagaagaaacggtttccattgaacaagtaaaaaagggagatgtatttcttgtaagacccggtgaaaatataccggtagatggcattgtgcttgaagggaacagtgcggtgaatgaggcagcgctcacaggagaaagcatcccggcagataaaaaagaaggagatttggtgtctgctgcgacgatgaatcagtctggtttcctgaaatgtgaggccacaagagtcggcgaagatacgacgctttcccagatcattcagatggtcagtgatgcggcagcgacaaaggctccgatcgccaaagtagcagataaagtgtcgggcgtgtttgtcccgatcgtcatggcggttgcggcgatcactgtcgctgtatggcttttggcaggacagagtgttggctttgcactggcaaggggaattgcagtgcttgtcatcagctgcccatgtgcgcttggccttgcgactccggtggcgatcatggtcggaaacggaatgggtgcaaaacatggaattttgtttaaaacggcagtttctctggaagagaccgggaaaacagaaattgtcgcactggacaagactggaacaatcacaagtggaaaaccagaggtgacagatcttcttccggcagatgggatgacagagaaagaacttcttcagattgcctatgcactggaacaaaaaagcgaacatccactggcacatgcgatcgtgcagagagcacaggaagagggtacagtggaaacggtttcggtcaaagaatttcaggcagtgccggggaatggattgactggaatatgggaaggagtgccccttgccggagggaatctgaattttatccgagagcaggcagacgtgccggtacagataaaacagacggcagaagcgtttgcagaggaaggaaaaacaccgttattctttacaaaagaaggaaagttagcaggagtgatcgcggtagcagatgtaatcaaggaagacagctcgcaggcaattcgggaattacagaacatgggaatccatgttgtcatgctgactggagacaatgaacggactgccaaggcgatcgggaaacaggccggtgtggatgaagtcattgcaggagttttgccggaaggaaaagaaagtaccattcgggcattgaaaaagaatggaaaagttgctatggtaggagatgggatcaatgatgccccggcgcttacgagagcggatatcggaatggcgatcggtgcaggaacagatgtggcgattgatgcagcagatgtggtgctgatgaagagcagactgagtgatgttccggcagcaatccggcttagcagagccacattgagaaatattcatgagaatctattctgggcatttttctataatgtgatcggaattcctctcgcagcaggtgtatggtatccgctgtttggatggaagctaaatccgatgttcggagcggcggcgatgagtctttccagcttctgcgtcgtgacgaatgcgctccggctgaatttgttccatttggaagatgccagaaaagataaaaagagaaacagacataaaaaacagagaaaagaggaggaattgaccatgcagaaaacaatgaaaatcgaaggaatgatgtgcggacattgtgaggcgacagtgaaaaagacgctggaggcgatccaaggagtagaggaagcggttgtaagtcatgaaacagggactgcagttgtgactttgagtggagatgtgtcgtctgatattttaaaagacgctgtcgaagcgaaagattatcaggtgttagaaatccagtaaaaagattgcgctgcagctgctattggaaaaaaaaggaagagaaggtaggatatgaaagaccaggatagaaatgacagagaatctctggaggagattcaggcagagactactgtgtcgaagaatcagacagaacaaaagcaacataagcgccgcgttcgatataaagggacacatccgcgcagctatcaggagaaatataaggagcttcagccggagaaatatccggagacgatcgagaaagtcattcaaaaaggagggactccggttgggatgcacatttctatctgtgtgaaggagatcttggattttctccagatccagccggggcagaaaggactggatgccacactgggatatggtggacatacaaaggaaatgttaaagtgtctgcagggacaggggcatctatatgcgcttgatgtagatccgattgagtcagtcaagacaaaagagcgattggagaaagcgggatatggagaagagattttgaccatccggcagatgaattttgcggacattgatcagattgccagagaagcaggttcgtttgatttcgtcctcgcagatcttggagtgtcttctatgcagattgacaatccggagagaggatttacctataagaaggaaggaccgcttgaccttcggctgaatccacagaaaggggtatcggctgcggagcgtctcaaagaggtgacagaagaagaactggcaggaatgttgtgggaaaattccgatgagccttatgcagaggagattgcggccacagtgatggaaaagttaagaaaaggagagccggtggagacgacgatccaacttcagaaagcgattgaagaggcgttatctttcctgccggagcgggagcagaaagaagcggtaaagaaatcgtgccagagaacatttcaggcgcttcggattgatgtgaacagtgaatttgaggtactctatgcatttatggagaaattgccggcgacactggcaccgggcggaagagtggcgatccttacatttcattcaggggaagaccggatcgtaaagaaggctttcaaagagctgaagcgagcagggatttacagcgagatcgctcaggatgtcatccgtccttcagcggaggagtgtacaaggaacagccgtgctcgttctaccaaaatgcgctgggcagtcagggcaaaagaataatagtaatgatatacagcagtagaaaaggaagggatttttatggaaaaaagagcatttgaaaaattggggatccaaacgtcacttcttggatttggatgtatgagatttccattgacagcggatcagaagattgacgaggcagaagcagagaacatgatcgaccgggcaatcgcagcgggtgtcaattacattgatacagcatatccgtatcacaatggggacagtgaacctttcgtggggagagtgctggaaaaatatgaccgtgattcttactatcttgcgacaaagctgccaatctggaagctggatacactggaggatgcgaaaaaggtttttgaggaacagatggaacgtctgcacaaagattatgtagatttttatctgcttcatgcgcttgaccgtgcaaaatttgagaaggtaaaagcgcttgggatcgtaccatatctggaagaaatgcgtgcggcaggaaagatccgttatcttggattttccttccatgatgattatgaagtatttgaggagattctaaattattatccatgggatttttgtcagattcagctcaattatatggatacagaaatccaggctggaatgaaaggatatcatttggcagaggagaaaggcattccggtcattgttatggaaccggtcaaaggaggaatgcttgcatctcttccgacagagattgaagaacagttgacaaaggagcgggcacaggcaagtattgcatcgtgggcgcttcgatttgtcggaacacttccaaatgtaaaagtcatcttaagcggtatgagtacgatgggacaagtggaagataatcttagtatttttgaaacatttgagccattatcagagaaggaacagaagctgatcgagaacacagcgggtactttgaaatcgcgtgtgaagaacggatgcaccggttgcgcttactgtatgccatgtccggcgggagtagatattccgggaaatttcagaatctggaacgatcaggcagtataccagaatacagaacagacgaagaaaaaatggtctggaatggatgaaaaagcgaaggcagatcattgtatccgatgtggaaaatgtgagaaagtctgtccgcagaaaatttcaatccgggaaaatctacagcaggtagcagaagaactgaatacattgtagagaaaagtaagtaaaaacaagccttgcagaggaagagattgctttcctgtaaggcttgttttggcttttgtcaagcgttgggataaaaagtttttctgtagagatagcgggtgtgatactggattaggataataatttctgtgcacagtttccttccacagtgccaatctgacaagtgctgtcataggaaagcgtaccgtcgcactggatatgatttacgacacagccgtctgtcaagagaatattttcagcgctgatcgtgtcacactgcagacatccggcttccagggttgtacactcaatattttttacgttgctgagtttccgatgttttgcaaaacgaaagaagttaaagctgttgcagttttcgggaataaaagtaatctgttctccgaacaagtcatttaaagttgccatgccacgaatctcgacgatgtcagcattgacttcttctgagcttttcaaagaaccagaaacataaatttcatctgcataaattttcccctgcaggtggcaggaaccactggctttgagagaacggactttcatatcgttttcagaatgaagagaaccgctgacatgcagtgtatttaccttaatttcactttgagaatgaatggaaccgctgatgtgcatctcatttccttccagtgtcgcatccggacatactttacaggagccgctgactttgaaagtttcaaaggttaccgggccttcaattgcgccgctgccgctgatcttgatcaagttatattctccctgtccgatttttccggaaccgctgattttagtatccgtcttcataaaagtttcctccttctttgagcagtgtcaaatactgcttgaaaaatgctgttgaaaagtgataaaaaatttaactgtttttgacagcctcttcatcgaatgtaaaagaaaaggtgtctttgtatttgagtttgatctcatggcagagttcctggagagaaatctggcagacgaccttgatccgctcgtcaaacaagagtgattcttccggggaaggattgagaagaaacagaccataatgtgcttcatttaccgcaagaagcagaaaaaaggtcttaatctctgtgatatttgcggcagtcgtggctacatttggaatcagatcgtatagttcatgttcctggatcagattttgttccttccacctgcaaagggtgatcatcacgagtacttcgataaaggtaaaggtatctttgttaagaacgtccatgaaatctgctgcaacacggatatcaatctctgtgaaacattctagttcctcttctgtgaaaacacggtttgtaatttccggggagagaagctttgcaagttcctcgagagagtagcggtctttcaaagtctggattgcctgcactcgttttaaaatctgttcttttggaaagaaagtctcctgaccggtcggactgggtcttttcacgaaccattcttctggaatcaggccttcccgtttccagcgatagagctgtccgtaggaaattccggttgtttttaaaaggtctttttttgaaagctctttttgagaaatgtccatatagcacctcctgttagaatcagttatatcaaaattttaataaaacaatgtgttaccaaaaagaaattaatgaaacattgttttgatatgaatagatattaacacaacattgttttgttgtaaagaggaggatgaaaaataaaaaaattttttgcgactatttccgtaatcgagtgtttaagcaaagtctgcaaaaaggagagaaagctggatgtacatcagaggaaaaggagaaattacttaaattgaataaaaaattgaaaaaagtgttgacatttgttctgatggatggtaatatatcgtttgtacgacggacatagagaagttgatatgcaggagtgtcggaattggcagacgagcaagactaaggatcttgtgatcaatgcgatcgtgtgggttcaagtcccatctcctgcattgctgtttcaagtgaccggggtacgttcggagcgtatgagattgctcaaaagtgaatacatatgcgagatgcaggagtgtcggaactggcagacgagcaagactaaggatcttgtgatcaatgcgatcgtgtgggttcaagtcccatctcctgcatgtcaggcatttacaggtagctgtaaatgcctttttatcatattacagaacaaaaaactgtgataaaggctcgtggcagatgatgggaagagaggagtgaaagagaaaggaattgtacagagatgtatagttccttttcgcttctttttctgaataatctgtctgcacagtacaaataaataacagtatgaggaggaagcttgtatgttggagaaaattgatttgacaaagaaactggaaaaacaatcctaccgcgagaagatggaagcactggaactggaacttggcaggttacagagggaatgccatgcatataagattcctgtgatgatcgtactggaaggattcggagcgtcggggaagggtgtccagattggaaaactcatacaggcgctggatccaagagggttccgtgttcatgcaatcactggagagacagaggaagaacagaaatatccattccttcgaaggttctggatcaagacaccggaaaatggaaagattgcgatttacgatacgagttggtaccggagagtacttgcggatcgtttttcgggaaacacagagaaggaggagctagaagattcctatgcggcaatctgttcttttgaagaacagctgaccgccggtggaactgtgatgattaaattgtttctcgcaatcgatcagaaagaacagaaaaagcggtttgagaaacttctggagtcaaaggagactgcatggagggtgtcacgggaagattgggagaaaaatgaaaagtacgatagctatgtccgaatgatcgaggaggcgctgcagagaacggatacagactacgcaccgtggacgatcgtggaggcgacagaccgcagattcgcaacggttaagatctacacgactgtgatcgaagcgctcaaggaagcggttgccgagaagaaggcggaagccgggcgagaaatttcacaagagacggaagagacagaaacgtgggaaaaccgagagttagaggaatcggtgcttgcgaaagtggatctgacaaaaagctatacggagaaagaataccataagaagaaaaagaaactgcaaaagaaaatcaggaagttgcacggggaactgtaccgtagacagattccagtgatcatcggatttgaaggatgggatgccggaggaaaaggaggggcgatcaaacgcctgacggaaaaaatggatccgagaggatttacagtgaatacgaccgctgcaccaaatgactatgagaaggcgcaccattatctctggcggttctggaagaatgtgccgaagaaaggacatgtggcggtatatgatcggacatggtatggaagggtgatggtagagcggattgaagggttctgtacgaagaaggagtggcagagagcattcaaagagatcaatgacatggaggcacagtttgtacagtccggtgcgatcgtactgaagttttggatgcagattgacaaagaggaacagagaaagcggtttgaagagcggcagaaaaatccggaaaaacagtggaagatcacagaggaagactggcgcaacagagacaaatgggatgcctatgaggaggcggttaatgagatgctgatccgtacatctacgccggaagcaccttgggtgatcgtggaaggaaactgtaaatactatgcgaggatcaaagtgctggaggcagtgatcgaagcaatcgagaaaagattagaaagcagataagaaggtggacagatgacgatcagggagcagatggaacaaagagaactagaatatttaagtccttatgcagcgatgagtgtaaactccaaaggccgtgacagagaggagattccatgcgatatccgtccagtatatcaaagagaccgggatcggatcttacattgtaaggcgtttcggcgactaaagcagaaaacgcaggtatttttgatgccgaaaggagatcattaccggacgaggctgacacatacgttggaagtatcacagaatgcccggacgatcgccaaggcactgcggctcaatgaagacctgacggaggcgatcgcgcttggacatgatcttggacacacgccgtatggacatgccggagagcgggcgctgaaccgcgtgtgcccgaacggattccgacacaatgagcagagtgtccgggtcgtggaagtgttggaaaatcagggacaaggccttaatcttacaaaggaagtgagggatggcatcttaaatcataagactgcaggacgaccatccactctggagggccagattgtcagattgtcagataaaatagcctacattgcacacgatacagacgatgcgatccgcggaggaattctgacagaggagagaatcccaaaggagcttcgcaagacactcggagcctcaccgagacagaggatgaatgcaatgatccatgacgtgatcacgcagagtatggactgcccggagattaggatgtcgccggagattggggaggcaactgcggagcttcggaagtttatgtttgcggaagtctatcagaattccagagcaaaagcagaggagaagaaagcagtacaccttgtggagcagctctatatgtattacatagagcatatttcagaactaccggaaaaatatagagacagaatcgaacgaggagaaggcaagaaagagcaaaacgtctgtgattttattgcggggatgactgatttatatgccgtaaagcagtatcaggaaatttttattccagaatcttggaaaatttaaaggaaatgagaaagttttgtcgaatatttataacgtaaggattttgagacagttttggaaagggggaaatcatgtattattcagaagacatcgtggaagaagtccgcatgaaaaatgatatcgtagatgtgatttccggctatgtgaaattgcagaaaaagggaagttcttattttggactttgtccatttcacagtgagaagtccccgtcgttttctgtgagcagggataaacagatgtactactgcttcggctgtggggcagggggcaatgtctttacatttattatggaatatgagaattactcgtttgtggaagcattaaaaatgcttgcggagcgcgcgggagtggaacttccggaaatggaatactctaaggaagcaaaagagaaagcgaacctaaagaatacacttctggagataaataagcttgcggcacggtatttttactcacagttaaaagggaaaaacggagaacatgcttaccgttatctgacagacagagggcttaccgatacaacaatcacacagttcggacttggatattccaataaatacagcgatgatctgtataaatttctcagggaaaaaggatattcagacgatctgatccggcaggcgggactgatcaatacggatgagaaacacggaatctatgataaattttggaaccgtgtcatgtttccaatcatggatgcgaacaaccgtgtcatcggttttggcgggagagtcatgggggatgggaaaccgaaatatctcaactcgccggagacactgatctttgataagagccggaatctttatggattgcatcgggcgcgcacatcgcgaaaaccatattttctgatctgcgagggctatatggatgtgatctcacttcaccaggcaggatttgccaatgcggttgcctcgcttggaacagcgctgacagcgggacatgcctctctgatcaagcggtatgtcagtgaagtctatctgacttacgacagtgatgaggctggtacaaaagcagctcttagggcagtgccgatcttaaaggaagccgggatcagtgcaaaagtgatccgtatggacccatataaagatcccgatgaatttatcaaaaatcttggtgcagaagcatttgaacagcggattggaaaggcacgcaatggatttatgttcagcctggagattttggagcgacagtatgatatgcatactccggaaggaaagacagagttctactatgaggcggcaaagaggctggcgcagttcgaagaggaaattgagcgcaacaactatatcgatgccgtggcagaagcttaccatatcggatatgatagtctgcggaaattagtggcgaaagcggcggtgcagtcggggatggcgtcaccggtggcaagaccgcggacgacacatgcaaaagaacagcaaaaagaagatggtatgcttcagtcgcaaaagattctgcttacgtggatgatcgaagatgaatctctgtttggaatgatccggaaatacattatgccggaagattttactacggagctttaccggaccgttgctttactgctctatgagcagtatgagaaaggagaagtcagtccggcaaaaattatgaaccacttcacagatgaggaggagcaccgggaggtggcagctttgttccatacgaagatcagggaactgacgaccaaaagtgagcaggagaaagcactcaaagagacaatcatccgtgtgaaagagaacagcatcgagacggcgacaagaaatttagaaccgaccgatattgtgggattacagcggttgatggagagtaaaagagcggtgcaggatctgcaaaaactgcatatttccatcaattaaggataaaatagaaacagattatggaggatagacacgaatggaagaaaatacattaaaactgattgagaaagtaaaagaactcattgcacttgggaaaaagaagaaaagcattctggaattacaggagatcaatgatttcttttcagatatggaactggattctgagcagatggataaggtgtttgaggcgcttgaggcgagcaatatcgatgtgcttagaatcggagagggcgatgaggacgacgatgatatcgagatcatgctcacagaggaagatgaggtggatatggagaaaatcgacctctcagtgccggatggaatcagcattgaagatccggtccggatgtatctgaaagaaatcggaaaagtaccgctgttaagtgcagaggaagaaatcgaacttgcaagaagaatggaagaaggcgatgaagatgcgaaaaagcgtcttgcagaggcaaacctccgtcttgttgtcagcattgcaaagagatacgttggaagaggaatgctgttcctggatttgattcaggaaggaaatctcggtctgatcaaggcagtagagaaatttgactacaataaaggatttaaattcagtacttatgcgacatggtggatccgtcaggcaatcacaagagccattgcagatcaggcgagaacgatccgtatcccggtgcacatggtagagacaatcaataaactgatccgtgtatccagacaactgcttcaggaacttggaagagaaccgcttccggaggagattgcaaaagaacttgatatgccggtggacagagtcagagaaattcttaagatttcccaggagccggtatctttggaaacaccgatcggtgaggaagaagacagtcatcttggcgatttcattcaggatgataatgttccggttccggcagaggctgccgcagcaacccttttgaaggaacagctggatgaagtgctcagtacactgacagacagagagcagaaagtgttaagacttcgttttggtatgaatgatggacgtgcaagaacactggaagaagttggaaaagaatttgatgtcacaagagagagaattcgtcagattgaggcaaaagcgctgagaaagcttcgtcatccaagcagaagccggaagttgagagattatcttgactagagaggaaggaaaagtgatgacagaattatcagaacggctgcgtgctgtggcagatctcgtggatgatgggatggttgtagcagacatcggaacagaccacgggtatattccaatcgcacttgtgcaggagggaagatgtccgagagcagttgcgatggatatcaatatcgggccgcttgaccgcgcaagagcacatattcaggcggcagagctttctgaaaagatcgatacaagaaggtctgacgggatgaaagagctaaaggcagaagaggcagattgtgcgattattgccggaatgggcggagcattgacgatcaagatcttggaggagagcagtgcgacagcaagaagtttgaaagcgctgatcttacagccccagtcggaactttataaagttcgggaatatttggcagagcaggggtatgaaatacttgctgaagacatggtgctggaggaaggcaaattttatccgatcatgaaagtgtgtccgggaagtccgtatacactgacgaaagaagaggcatgttatggaaaagaacttctttctcagaggcatccggtactccaaagctttcttcatagagagctggatatgaagcgaaaggtattaagagaattggacgataaaagtggtgatcatatttgccagagaagagaagcactgcagaaggagactgcatgtgtagaaggaatcttaggacagtgggaatctgggggaaagcaaaagaaatagaagaaacgggaggaaagagcgatgctttgtaaggaattgacagagaaaatcgaagaagtatatccggtttcgtatgcatgtgagtgggataatgtagggcttcttgtcggacgagccaacaaagaggtgaaaagcgtttatcttgcgctggatgtgaccgaggaagtaatccgggaagcggttcgggtgaaggcagatttactcattacgcatcatccattgatttttaaggggttaaagaaaatttcagatcaggattttattggaaatcgtgttgtacaattgctgcagcacgatatttcctattatgcgatgcatacgaactatgatgtactgcggatggcagatcttgcggccaaccgtctaggcttacagtccatagaggtgttggaacagactgagccaaaagaaccagagaaaggaatcggcaaatccgggcagtttgtaagtgcgatgactgtgagggaatgctgtgaacttgtcaaagagcggtttgccctttcgaacataaaagtgtttggggatttggacagaaaaattcagagagtggcggtctgcccaggatctgggaagagtgtaatcggggaggcgatcagaaagaaagcagaggtgctgattaccggagatattgatcatcattctggaatagatgctgaggcgcagggacttacgatcatggatgccgggcattatggaatggaacatatttttatagaggacatgagaaagtttttggaagaaagatttgaaaaactggatatcaagtgtgctccgatcagtcatccgttttctgttgtgtagcatagaatgtaagatgacagagaagaaagaagggaaacaggtggaacaacagagatataccgttcaggttgggaaggtactccgccagtatgaagcggggacaacttatgagaagatttcagaagattttcaggcagagtatgaaaatgatattgtgcttgtttttgtagacaaccgtcttcaggagcttgggaaaaagttaaagaaagactgtgtattaaagtttgtcacaaccggtgaggcaattggaaaccagacttacagaaggagtatgagccttttgcttgtgaaggctgtttataacgtggcagggcatgaaaatatagataaagtgagaatcctctattctgtaagcaaagggtattattgcaaagtagaggggaatgttgtcgtcaatcaggatttcttaaaccgggtgacaatccgtatgcgggatatcgtagaagcagacataccgattaaaaagagaagtgtatcgacaccggatgccacagcgctttttcaccagtatgggatggtggataaagagaagctttttgagtatcggagaggatcgaaagtgaatctgtacagtttgaatgagttcgaagattactactatgggtatatgcttccgagcacaagatacttgaaatattttgaactgcatttatatgatgaaggatttgttatccaaatgccggtagcgtcagcgccaaaagaggtgccgccgtttgtacctcagaataaattattccaggtgttgaaggaatctacaagatggggagatatgcagggaattgagacggtcggagagctgaatgacattatcacaaagggggatatccttgaggagatgcttgtccaggaggcgcttcaagaaagtaagattgcctcgattgcagcgcagatcgcagccagaccggaagtgcgttttattttgatcgcagggccgtcctcttcgggaaagactactttttcccacagactgtctgtacagctcagagtcaatgggcttgtgccgcatccgatcgcggttgacaattattttgtagaccgggaactgacgccgaaggatgagaacggtaactacaattttgaatgtctggaggcgattgatctagagaaatttaatcaagacatgacagatcttctggaaggaaaggaagtacagcttccgacatttaattttaagactggaaagcgagaatatatttcaaagccgaaaaagcttggggcaaatgatgtccttgtcatcgaaggaatccactgtctgaatgatgcgatgacttataagctggcagcagaaaataaatttaaaatttacatcagtgcattgacacagttaaatatcgatgagcacaaccggattcctacgacagacggtcgtctgatccgcagactggtaagagatgcgagaacgcggggaacttctgcccaacagacaatccggatgtggccttctgtcagacgcggggaggaggaaaatattttcccttatcaggaagatgcagatgttatgtttaactctgcactgatttatgaactggcagtgttaaagcagtatgcagagccgattttatttggtatcgacaaagagtgtgaagagtatacagaagcaaaaagacttctgaagttcctcgagtattttgtcggtgtcggaagcgaaaatattccgaaaaactcgcttcttcgagaatttgtcggtggcggatgttttcaagtatagcaggtgacagtcatgtcagaatatacattgagagagcagaagctcaaacgaatgaaggaactgcggcgcagaaaggtgcggaggcagaagatatttctcggatgtaccgccggggcaatcctctgtgtggctgcagggatctttgtgtatagtagaagctatacgttagacttgaaggcaaggatacttccggaaactacagtggaaaaagcagtaccgctgcttggagggaatatagaacaggcattggaacagacgacagaacttgcagtaaaaaatagtggaacaaaggtcattgcacatcgtgggtacagttctgaggcaccggaaaatacgcttcctgcctatgaactggcagcgcagagtggtgcatggggaattgaggcagatattcaccggactgcagatggggcatttgtatgtatgcacgatccaactgtagatcgcatgaccgatggaaccggagtgattgcggagatgaccttagatgagatccagatgctgacaattgacagtggcagcaacagttgggcatatccatatgcatgggtgccgaccatggaggaatttttggaagtatgtcgacagagtggtgcaaatgctgtgttagatcttaagtttacttctgtagaagatattatttcgcttgtgcaaaaaatacaggaacttgggatggaagattccgtggtatgtctaagcggcagtctggatcagctaaagaagatccgggaatgttctgagattatccgtatcaaatatctggtggaggaagggacgcaggaaacaatcgaccaaatggcagaattgtcccacagtgggattgcagcatccagaatcagcagcgatatggtagcctatgcaaaagacaagggaatcagtatcaacgtctggacatacaatgaaagctgggaaaagcaagagtggaccaatcaggagattgattttctgacgacggacgatctttccacttagatggaatatgtaaaaaagatagaactatagtaaatgagcgtggcgtaaaataagggatttcataagaaatctattttacgtcacgctcatttttacgttgtggtcttttgaaaaattgcctgcatatcttttggcagaggtgctgtgaaggtcagtgactgttttgtgattggatggataaaggagagtcggtaagagtgcagtgcctgacggtctatacagtgatcctctggatggtagagaaaatctcccggaagcggatgcccaatatatttcatatgaacacggatctggtgggtgcgcccggtctctagtttgagagaaacgagagaatacccattttgataagcaagccggtgaaaatgggtgcaggcataatcaccgtgcgcgaaatcgacacagcgctcgatggtagaaccgtttgcccgcccaatcggtgcttcaatcatcccagactcttcgacaagaccggtggcagcggcaagatattctcgatgaatctctcgtttggcgaccatattggacaaaagagaagcgctgtacatatgtttggcaatgatcagaagcccggtagtatcccggtctaagcggttgatacagcggtaggtgaaaggaatgttctgagaagcaaagtagtaagcagcagcattggcgagcgtattctcataatttccttgagaaggatgaatcggcatgccggaaggcttattgatcacaagcagatcttcgtcctcgtatacgattggaaatggaagaggcacgggaacgatgtgctctgaggaagtttcttccacgatggaaatcgtaagaagatctccactttgcagcacttcgtgtacccgtgcccagacaccgtttcggcagatgccgtcaggtgtccgctttaaatgcgtgatcacctgactggaatactgctgttgctttaggaaagactggatcgtcatgccggccatttcatgatggatcggataggtaaatgtccgtttcattattttgatttaatctccctccataattcattgtatagcacatcgttctcgtcgccgaggaactggaatgtctcacaccgttctaattcagaagcatccggaaatgcgatagtgctgttgcggattgcaggatctttgatcagttttcttgcttctatgttaggtgttgagtaagtgatgtagtcaaagttcatcttggcgatgtctggacggcagaggaagttgataaatgcctctgcattttctttgtgctttgcattttttggaatgacccaggagtcgatccatacgttggagccctcttttggaatcacatattccagatccggattttccagctgggtataaatagcctctccggaatagataacaccaatggcggcttcatttccgatcatcttatcacggacctggtcaattacatatgcctgcacaagcggtttctgttcgatcaacagtgcttttgcagcttcaagctcatctaggtctgtggagtttaaagaatatccaaggtatttcagagcaacagcaaatgcatcgcggacactgtcctgcatcaaaatattgtctttgtatgtttcgtcccagaggacagaccagctgtcgatcggttccttaaccatttttttgttatagaggattccgacagtaccccagcagtacggaacagaatatttattttccgcatcaaactggcgggattgctccatatactgtgtgccaatgttttttatatttggaatatgatcaaaattaatttctgcgagcaagtcattctcgatcatgcgctgggtcatatagtcggatgggcagacaacatcgtaggcgatggcgccggactgcacttttggatacatgatttcgtttgtttcgtattcttcatagacaaccgagatgccggtttcttcctcaaacatagtgattacttccgggtcaaggtattctccccagttgtagataattacctgattatcaccactgacggatctctttgaaccgtagaaaaatcctccggcgatgatcacgattgccataactgcaggaacgaggcgccggaatacaaagcgggcagctttactttttttgctgacatattttctggtgctaccttctttggaagaaggagaaacattgacgagaatcagcaagattagcacggatacaaacaacaaggtcgaaagcgcatacatctccggcttgatcccttttcgaacttcactgtaaatttttgtggacagtgtgtccacgcctggtccttttgtaaagtgagtgatgacaaaatcatcaagggacatcgtaaaggcaagcagaaatcccgagaagacacccggaaggatatccgggaaaactactttgaaaaatgcatagattggagaggctccaagatccagtgcagcttcataagtccgacggtttgtctgctttaattttggcatgacacttaagatgacataaggaatgttgaacgtaatgtgtgccatgaggatcgttgcaaatccaagtgaaaagcggaatgcgataaataagagcattagggaaattccagtcacgatatctgcatttagcatcgggatattggtgacagccatcatcgctgtacggactctttttcgcattgcctgaatgccgatcgcggcggcggttccgatgagtgtggcaatcagcgccgaaagaagggcgatgatcaatgttgtgtagagcgcattcataatctgctcattctgaaaaagggcaacgtaccattttccggtaaagcccccccatttggcgcgtgtcttggaattgttgaaagacagcacgacaagggtaatgattggggcataaagtaaaatgaaaataaaccccaggtagattttctgtaatgtatttttaatcaaaatgcagttccctccccgtctttatcatatttggcgatgagagccatacttaaaataatgaagatcatcagcacgagtgaaagcccggagccgacatgccagttacttccttgtttaaattcctgctcgatgacatttccaatcagaaggattttacttccaccaagaagatcggagatgacgaaggttgtgagcgccggaacaaataccatggtaattccgctgatgattcccggaacggtcaatggcagtatgattttaaagaaggtctgacggttgtttgcgccgagatctcgtgcggcattgatcacatctttgtcaatctttacgagcacgttgtagatcggaagtaccataaatggcaaaaagttatagaccataccaagaatgatcgcataaggtgtgttgatgattgcaagctgcggcaggtggaaaaacgacagaatactgttgatcacaccattcttttctaataaagtctgccatgcgagcgtgcggagcaaaaaattcatccacatcggaaggatgaagatcaatacaataaagcttgtctggttgacattcatggaggcgaggatcatcgccagtggatatgccatgacaaggcagattaaagtactgatcagagacaaaagaagcgcaagtccgagcgcttttaagttctccggtgttgtaatctttgcaaggtttgcaaaggtaaaggcaccatcctgatctgtcagcccataatagaagatcatcagaagcgggatgatgataaaagataccgaccagaataagtacggtccggcaagtaattttttactcttcaactggaaccgcctcctcatcttcagattctggctttttcataatctggatatcaaatgggtctactttgattccaacagtcgtgccgaccggaaccatgtctgtactatgtacaagccagtcaaagttatttgcggaaacttccatctcatagtgaacgcctttgaagatcaggtgtgtcacgactccctcgagaagtccttcttctggttttacaagatcaatatcttccgggcggatcacagcatccacaggtttgttttttccaaatcccacatcaacacatgggaaattgacgccgagaatttttaccagtttatcttcgaccatgacagccggaagaatattgctttccccaatgaagtcagcgacaaatgcattttccggttcgttgtagatatcttccggcgtaccgatctgctggatatatccctgattcatcacgacgatggtgtcggacattgtgagcgcttcctcctggtcgtgggtaacatagataaatgtaattccgagttcgtttttcagacggatcagctcatactgcatatcctgtctcaatttcaagtcgagagcgcctaaaggttcgtcgagcaggagcacttttggctcattgacgatcgcgcgggcgatagcgatccgctgctgctgtccgccgcttaaagagtccggagtacggttctcgtaaccatcgaggttgacaagctttagcgcatagcggattttgtcattgatatatgcttttgatttccctttgatcttcagtccaaatgcaatattttctgcaatggacatgtgggaaaacagagcatatttctggaagactgtgtttagctgtcgcttatttggcgggacattattgatattttttccgtcgaaaataatgtgtccggaatcacagctctcaaatccgcccaggatgcggagcagagttgtcttcccgcatccactcggtccgagcagtgtcagaaattcattctccctgatatataagttgagttcatcgaggacgagattgtccccgtaggattttgatacatttacaatatcaattaatttgttagccatatgctcactcctccttcgttttgttaaatagatgttttgtacatgaaaacaattagaaataattaaaaactgggtggtgtgcttacccagataaattttgcaccagtcttttttcccgcactgatcgaatgttcacagttcggggcaaaatagaaagtctctccctttttggccgtgtatacccgctgcccgagatggatatggatcactccttgaaggacatatccgaattcctctccctcgtggggtctgtctgggtaagtggagcctccggggagtaaggtgacacggattggttccatcatattcttctgtgcattcgggatgatccattcgatggtgttgagaagttccgcatctgttttttcaaagaaatcttctttaggaaatacgatctgctcatcggagtcatcggagaagaaatctttcagatttgtcccgagacattgcagtagatcgaccagcgttgcaatcgaaggggaggtaagatctctttctatctgggagataaatcccttcgaaagttctgcccgatcggcaagttcttcctgcgtaagtcctttctccatgcgcaattccctgagtttattgcctatattcatatatacggacatcctttccatacgtataagtactattataaataaacaaaaagtttactatttctaaacaaatgtgcctatattattatactctattttaggtaatagtcaatcagaaaatgaagaaaaacagactttgttgaaggttatccgccttgataggttatgcaggtgatagggcttagaaaagaatttcagaaaagattaagaaagaatgaaaagaaaagtaaaaaaaatttgttaaactaaagacagacaaaacgttcgcgtataatattgtctgaaagaatatcatacgcgaacgaaaaatattattaaaaatggcttatagattcttttggatcttatcttttgtaaaaggaaagaatcttatccagtctggaactcatgttggcaaataacagatcgatcagtgtgagtgccaccatggactctacgacaacgactgcacgcggaacgatgatcggatcatggcgtccgtgaatggaaagatcgatattctcagatgtagttgtcacagtctgctgtacttgtgaaatagaaggtgtcggtttaaacgcagcgcgcaggacaatgtctgagccgtcgctcattcctccgaggattccgccggaatgatttgtcagctttgagatggagccgttttcgcaggtgaaggcatcgttgttgatacttccatgagaagtggctgcctgaaaaccgtcaccaatctccacacctttgacagcaccgatggacataacggctttggcgagagcggcatcgagcttttcaaaaacaggctcaccgattccggcaggcattccgtgaacggtacattcaacgactcctccggaagaatcctgtttttccatacattcttttaagtatatttctgcctgtccggcatatgtattattaggcatatacagagcattttccataatctcagtcagatgatattcagatgtaggaacggtaacaggtccgatcgacttggcgtaagccatgatagtaatccccatttctgcgagcagtttggaggcaatagcaccggcagcgacacggccgatcgtctcacgcccggaagaacgaccacctccgcgatagtcacggaatccatacttgctgtcaaaagtaaagtcggcatgtccgggacggtagcaggaagcgatatttccgtaatctttggagcgttgatcttgattgcgaacaattaatgaaattggtgttccggtcgcacgtccttcaaatacaccggagaggatttctacttgatccgattcgtttcgctgtgtcgtgtagcggctttgaccaggctttctgcggtcgagaaagcactggatttctttcgcggagagtgcaagtccggcaggacatccatcgatgacgacaccgattgccggaccgtgggattctccccaggttgtgatgcggaatgaatttccaaaataggaaccagccatatataaaaactcctttcgtgacaaaaatattacaaacttttgtcattattatataggaagttaaaaaaagtggcaatgcttattttatactgtacttttagaaagggacgtattataatgtttactagatattgtttagagaaaggaaatagatactatatgggcggcacgaatgataagagaagacgccagggatctgggaacagacatgcagacgggcgtgtagatgacatcgaatacttctcctatcgtctggatgatggtccggatgaggagaatatagaagagatagagaagaaagaaaagaaaagaaagaatccgcggccgcgtgcccaaagatctgatcttcagaaggcgcagtttacggctgaacttccaaaagagttacggacacaaaaggcaaagaatcttgcgcggaaagaactacagaaacagcatggacagaagcagcatgagcagaagagaaatcatcaggaagaatctgttaaaaagaattcccagcacagggaggagagcagaagatcttctgagatgcagctgaaacagaacgcgaagaactcatcaggaagccattcagcaaagcaggatcatcagaaaaatggcaaaagcagcgagaagaaagagcagatgaagaagaaggtattgtttatcgcaggagggattcttggagcggtagcgcttgtttaccttggatttgctttctattttacaaagcatttttattttaatacaaccatcaacggaaatgatttttcaggtaagacggtaaaagaagcagagtcttatatggagaagcaggtacaaggttatacacttaccttaaaggaaaatgatggcggaacagaagtgatcagtggagaggatatttctctggaatatcttcctgggaaagaactggagaagattgtaaaagatcagaatgcgtttctgtggattcgggcattgttccaaaagggaagcgcagaggcgaaagtggatgtccagtacgatgaggcggcattagatgcattgatcagtggacttcagtgcatgaagccggagaatcagacaccgtcagtatctgcgaagccgacatttgacggggatacattcgtgattacaaaagaggtagagggcacacagttggatcaggaagtcttccgccagaagatcaaggagaagatcagtggattccagcatgaggtggatctggaaaaggaaggctgctaccttaagccaaaatttactgaagattcacctgaagttgtggcggcgagagataagatgaattcgtacctcggaggaacggtcacttatcagatgggagcgactccggaaggaattgacaaggcaaagcttgcagagtggattacagtcgatgagaatatgaatgtcacatttacgacggatgggatttctgcatatgtaagagatctcgcatccagatatgatacagtaggaaagacgagaagttttacgacaccaaccggcaaagctgcgactgtatctggcggtacatacggatggagtattgatgagccggcagagattgagcagttgaaggcagatattgccggaggaaagccggtacagagagagcctatctatgaaaaacgcgcagcctcatttggtgcgacagactggggcaatacgtatgcagaagtggatttgtccgcccagcatatgtggtatatccagaatggaaatgttgtgttggagacagatattgtatcaggttttccgacaccggacagaatcacaccggagggagtctacgacgtgctttataaggaaagtccgtctgttcttgttggggaaaaagatccggagacgggacagccaatctatgaaacagaagtcagatactggatgcagtttacatggagcggagttggattccacgatgcggactggcagccggcatttgggggcagtctgtatcagagtgccggttctcatggatgtatcaatatgccgattgataaggcggggcagctgctgaacttgatcagtgcaggagttccggtcatttgtcattattaagtcagaggagaaaaagaatgtatcaattaataaaaagagatggtcttgccaaaagagggagactgaaaacagtacatggtgtgatcgagacgccggtatttatgaatgtgggaacagcagcagcaatcaaaggtgctgtctccacagaagatcttcaaggaattaagacgcaggtagagctttcgaatacctatcatctacatgtgcgtccgggcgatgaagtagtaaaaaaactcgggggactgcataaatttatggtgtgggataagccgattctgacagattcaggtggatttcaggtcttttctcttgcgggattgagaaagatcaaagaggaaggcgtgtatttccactcccacatcgatggaaagaaaattttcatgggaccagaggagagtatgcagatccagtccaatttagcatctacgattgcgatggcgtttgatgaatgtccgtccagtgtggcagaccgcaactatatccagcactcggtagatcgcacggtgcgctggttggagcgctgtaaaaaagagatggcaaggctgaatagcctggaagatacgatcaacaagcagcagatgctgtttggaatcaatcaaggtggtatttatgaagatatccgcatcgaacatgcgaaacggattgcggaacttgatctggatggttatgcgctcggaggactggcagtgggagaatcccatgaagacatgtatcggatcattgacgcgacagttccatatcttccacaggacaagccgacttatctgatgggagttggaacgccggcaaatattcttgaggcggttgacagaggtgttgatttctttgattgtgtctacccaagtagaaatggaagacatgggcatgtttacacgaatcatggaaagatgaatctgttcaatgcaaaatatgagctggatgacagaccgatcgaggaaggttgtcagtgtccggcctgccgcaaatacagcagagcctatatccgccatttgctgaaagcaaaagagatgcttggtatgcgtctgtgcgtgctgcataatctgtatttctataacaatatgatggaagaaatccgcacagcgatcgaggaaggaagatataaggagtacaagaagcagaaactggaaggattcacacgcggacagatataaacaaatcataaaatttctaaaaataacttgatgtctcagcagaaattgtgtatcatagcaatagtgcttaattgagaagtaggaggaatttagtatgaatggtttattagcgtcaggtggagctggtggaatgttttccattatcttagtgtatgcagtactgatcggaggtatgtggttctttctgttccgcccgcagagaaaagagcagaagagaattcaggcgatggttgcttctatggaagtaggagatacagtattgacaacaagtggattttacggtgtactgatcgatatcacagacgatgatgtgatcgtagagtttggaaataacagaaactgtcgtatcccaatgcagaaatctgcaattattcaagtagaaaaagtaaacgaagaataattagaatacctttcattttggacggaaagctgtctggaatggaaggtattttttgcttcgaaaaggcgtatgaaatgtgcgggaaatacgattgcagtctggtgggaaattgtgtatactgaaaagagaaaaagtgttacaaaagtttagggggtacaaaatttatgaggcagataaagcgcgcgcgcaagcgggaacgcgttaaaaagaaactgatcagcatcgtagttctttgcctgctgtcggtcatacttttcagtacggcagcggcttctgaaaagagtggactggcagtgatttctgtgaaggcgaagtcagagacgatgtaccaggacagtgaacttccaaagttttctgtggatattcatggggaaggtgcgatgaagactacgttagatgaaaaagagcagtatacggcacagcagtttatggaaagtctgacagaggggaaagactacacgctggaatgtgaatcggacgggacaaaagaaggaacctttccggtcaaaataaaactttcagatgatttgcagaagaaactagaaggggaactgtctcagtccatattttttgagacacgggatggtacgttgactgtaaaaaataaatatggcgagtgggacgggaagaagtttaagcagccggacggaacttatgtgcaaaatggatgggtagaagatgacggagagaaatactattttgacggggaaggaaatctggtaaccggagaactgcggattggtgtcaaaacttatcaatttgcaaaagatggaaaattgaaatccgaagagagttctattgatccgaataaacctatgcttgcactgacatttgatgatggaccaggcaagcggaccggggaattgctggatcaattggaaaaatataactcacgagcaacctttttcatgcttgggcagaacgcacagaacaacggggagttgatcaagcgaatggcaaagcagggatgtgaactttccaaccattcgatgacacatgcgaacttatctacgatggatccggcgggaattttagacgaggtggacggcacgaacaaaatcatcaacggatttgttgcaaatggcactacaacacttcggccgccttatggggcagtcagtgacacactgaaacagactgtgaaaatgccatttattatgtggtctgtggatacactggactggcagacaaaaaatgcaaaagcgacggtagatagtgtgctgaataccgtgagagatggagatatcgtattgatgcatgatattcattccacgacgatcgatgctgcactggagttgattccaaagcttgtggatcagggctatcagcttgtgacagtcagtgaacttgccgaggcaagaggagtcatattggagaatggtcatcagtattattccttcccaccgggagccgcagagtctggggaagcaaaagtacagccacaggaagaggtatttgaaggggagtatcaccacgaagaggtgaacgaacagcaacaataaaatgcatctttccgtgtgggtatgaaaaataattgataaatggaaaagtatgacagttagataaaacgaagagggagagacacattgctttgtgttatctccctcgtagactttataaattgtgacttgcacagtttctctatctttttttataagtttccaacagtctgtggattttatcggttggatttaatacggaaccgatggaaatgtcgtgattcagggaatcaatgatcaacgcaaggaacttactcatatctgccacaacaaaatatggcttttcagaagcctctgcaggcaggtaagtgaggtttgtcgtgatcacgcgatcgatgtaccctttctcatagtattcatcaaattttcccaatccttctgtgaaaagtccgaaggttgtgcagataaatacgcggtttgcgtggcggtcttttaattgttttgccacgtctaacatactttctccggaagaaatcatatcgtcgaggatgatcacgtcttttccacttacgtcatctccgaggaattcgtgggcaacgatcggatttttcccgttgacaactgtagagtaatctcttctcttatagaacatacccatgtctacgccgagcacgtttgagaaatagacagctctgtgcatcgcgccttcgtccgggctgatgatcatcaggtgatccttgtctacttttaagtcggattctgcacggaacaatgctttcatgaactgatatgccgggctgaagttgtcaaatcccttcagtgggattgagttctgcacacgcgggtcgtgggcgtcaaaggtgagaatattgctgacacccatatcgatcagttcttccagtccgagtgcacagtcaagagactctcgctttgtgcgcttatgctggcggctttcatagaggaatggcatgatcacattgatgcggtgtgcctttccggtagctgcggaaatgatacgtttcaaatcctggtaatggtcatccggggacatgtgatttaaatgtccgttgacagagtaagtcagactgtaattgcagacatctaccatgacaaataaatctgcaccgcggacagattcgtggatcattccttttgcttctcctgagccgaaacgcgggcaggaagttttcaaaaggtaactgtcctttttgtagtttgcataaagtgcagaagactgcatggattccagggcacttttccggaatgtcacgatgtagtcgtcgactttttgcgccagcggcagacagctttccagtgctgcaatgcgaagcggtgccgccggaagagttttttctaataattgaatatttggcataatggcctccgttaaaaaatttattgacatttcatttatatcactttttgatctgtggggcaagaaagaggtgtaaaaaattgctttttccttaaaaatctagtatgataaaaggaagccagaaacaaatatggcagaaaacgcatgtttcgaaagagatgtaaaaattttgacgaaatacaggcggtatttgtttggaagtagtagaattaggagaagacaatatgaaacatagacatatcatccgttccgtggaggacggaagtattgcgtgggaacttggcgtggagccgggggactgcctgatcagtatcaatgacaaggaaatagaggatgtttttgattaccattatcttgtaaatgacgaagaacttgtacttctgatcgagaagccggacggagaagagtgggagctggagattgagaaggactatgaggaggatttgggcatcgagtttgagcaggggctgatggacgagtatcgttcctgcagaaataaatgtatgttctgcttcatcgaccagatgccgaaaggaatgcgagagacactttattttaaagatgatgattccagactctccttcctgcagggaaattacatcacgctgacaaatatgagtgatcatgatattgaccggattgtacagtatcatctggagccgattaatatttcctttcatacaacgaacccggaattgcggtgtaagatgctgcataaccggtttgcgggggatgcactgaagaaggtacagacactctatgagggcggcatcacgatgaatgggcagatcgtgctctgtaaaggaatcaatgacggcgaggagctggagcggagcattcgtgatatgacggcatatctgccacatttgcagagtgtatcggtcgttccggttggattgacaaaattccgcgacggactgtatccgttggagccatttacaaaagaagaggcgaaggaagtgcttgcgatcattcaccgctggcagaagaaaatctatgaggaatatggaacacactttatccatgcaggagatgaatggtacattcttgccggggaggagatgccggaggaagagcgttacgacggttaccttcagctggaaaacggagtcggcactacaagacttttgcagaacgagtttcaggaggcatttgagcaattgtctggggatgacagagagacagagatttccctggcaaccggaaaacttgcgtatccgtatttaaaaagaatgatcgagacacttcagacaaaatatccaaatgtgattgtccatctctatgagattcgaaatgatttcttcggagagctgatcactgtggcgggactgatcaccgggcaggatctgaaggcacagctttctggcagaccgcttggaagcagattgcttctgccgtgctgtatgttaagaaacggcgaagaagtatttcttgatgatgttaccttagatcagctgaaagaggctttacaagtgcagatagatattgtaaaatcaagcggacaagatctcatcgaagcagttctggatgagcagatgtaggtgacttgtcagaataaagacaaaagaaaataataaaataagacagatataggagtgaaactatgagtaaaccagtagttgccatcgtaggaagaccgaatgtaggaaaatctacattattcaatgcgctggcaggagagatgatttccatcgtgaaagacacgccgggagtcacaagggacagaatttatgcagaagtaacatggcttgatcgggaatttaccctgattgacacaggcgggatcgagccggacagcaaggatatcattcttgcacagatgagagagcaggcgcagattgcgattgacactgcggatgtgatcatctttatcacggatgtcagacaaggacttcaggattcggattccaaagtggcagatatgctgcgccgttctggaaagccggtcgtattagttgtcaataaggtggatagcttccagaaactgatggcagatgtgtatgaattttacaatctgggaatcggagatccaatcccgatttctgcatcctcaagacttggactgggagatatgctagatgcagtcgctgcacattttccggagcattctgcagaggaagaagaggatgagagacctcggatcgcgattgtcggaaagccgaatgtgggaaaatcttcgatcatcaataagctggtcggagagaaccgtgtgatcgtttccaatattgcaggaacgacaagagatgccatcgacacagagattacatggaatggaaaagaatatgtcttcatcgacacagcaggacttcgtagaaagaataagatcaaagaagaactggaacgatacagtattatccgtacagtgacagctgtggagcgggcagacgtcgtcttagttgtgatcgatgcggtggaaggtgtcacagagcaggatgctaagattgccggaatcgctcatgagcgcggcaaaggtgtgattattattgtaaataaatgggatgccattgagaaaaatgacaagacgatgtatgagtatgaaaagaatgttcgtcaggtattgtcatacatgccgtatgcagagatcatgtatgtgtctgcgaagacggggcagcgccttccaaaactgttcgatatgatcgatatggtattggagaatcagacacttcgtatttcgaccggagtactcaatgagattatgatggaagccgttgcgatgcagcagccgccgtcagataaaggaaagagactaaaactttactatattacgcaggtggcagtgaagccgccgaccttcgtcatttttgtcaacgataaggaactgatgcacttctcttacacacgctatctggaaaataagatccgcgaggcgtttggatttaagggaacctcgttaaaattctttatccgcgagagaaaggagaaagaccgataattatggaacgtttggtctgtgtgatcataggatatgtctgcgggctgctgcagacgggatatctctatggaaaatggaaacatattgacatcaggcagcatggaagcggtaacgccggaacgacaaacacactgcggacattaggatggaaagcgggaatgatcacgtttctcggagatttcttaaaatgtgtggtggcagtgtggatcgtacatatactttatagtcaggcttacccggaggaattagcacttctttccatgtatgcaggaatgggcgctgtgctcggacacaactatccgttctatttaaaatttaagggcggaaaggggattgcggcgaccgcagggttgatttttgcgacaaatccgatgatgatgctgatcgcggcaatcgttttctgggtaatcgtcggaattaccagatatgtttctctgggatctcttacaattgttgtgctgtttgttgtagaggttgttgtatatggacagcgcggaggatttggactttctcaggcacatctgtatgagatgtatgcgatcgcagtctttttaatgttgtctgcattttataagcatagggcaaatatcaaaagactgttaaatggaacggaaaataagtttggtgcaaagaagaaacaggaggactgattatggcaaaagctggagtattgggcgcaggaagctgggggacagcacttgcattactgttggataaaaacgggcatgatgtgacggtatggtcgatcgatcaggcagaggtggagatgcttgaccgtgagcgggagcacaaaagcaagctgccgggagtgaaacttccgcagacgatgaaatttaccaatgagattcaggaagcaattacagatcaggatttcatggtgcttgcggtgccttctccgtttacgagggcaactgcaaagaagatggctccgtttgtgaaagaaggacagaaaatcgtcaatgtggcaaagggaatcgaggaaagcacactgatgacactttctgagcagattgagcaggaaattccacaggcggatgtggcggtattgtccggtccgagccatgcggaagaagtcggaagatgtcttccgacgacttgtgtcgtaggggcgcgtacaaaagagactgccgaatatcttcagaagatgtttatgaatgaagtctttcgtgtctatacaagcccggatattctcgggatcgagcttggcggctcgctgaaaaatgtcattgcgcttgctgccggaattgccgatggacttggatacggggataacacgaaggctgctctgatcacgagaggaattgcagagatcgcacgcctcggggtgaagatgggtggaaagatcgagagcttcaccggactgaccggaatcggagatctgattgtaacttgtgcaagtgtgcacagccggaatcggaaagcaggttatctgatcggtcagggaaggacgatgcagcaggcgatggatgaagtgcagatggttgtggaaggtgtatattctacaaaggcagccgtaaagcttgcacagaaatatgaagtgcagatgccgatcattgagcaggtcaatgcagttctctttgaaggaaagagcgcggcagaggcggtaaaagaactgatgctccgggatggaaagacagaacattcggatctgccgtgggaagcataagatatttgaatattgaaagagaaaaaggatttcaaactgtttttagtcagcagtggaatcctgaataaaataaaactccttttcgtcaaaagaaaatgaaaagcaattcatttcttgacgagaaggagtttttcgttgtaccggatatagggatgacctgatcagggaaagcccggtcacaggtgcgatcaacttatttaggtttctgcttcttttatctttgtcagtctgtagaatgcgattccgccaagactgtttccggcaattgccacgagcagtgtcagaagatagtctgccggagaacttgagagtgcgaagaagaacatgttcgctacacagtgttcaaatccggcgaggataaagactgccacgcacaaaaagacggccagtgttcctaaaatatttggaagctttttaaaggttccaactgcgatggacatcaggattccacagaaaatcgcaaggatgaatgtgcttaacagattgtcagacaattttagttccacggccggagcaactacttcttttaattttcctgcaaggcgtgtctgaagtacgagaaacgcaaagaggttggtaccgatgaaattaccaatcagtgtcagaagtatttctctccagttctcttttgaaagatagccgatcttaccggtatataagttcaactcgaaattgatgatcgtaaacagtccgagaccgaagaggaatgcagcgacgatcttattgtccatatttaagtagacagttccgccaaagccgatcagaaatcctccgatgatagatttttttaatgttgtcaaaatattcatgtttcacctcgtttgtagttattccgcaatattatagcataaaaatgctttaggaaaaagaaaaaaataaatagaatagcggagattctaaaactggctttttttgcatagattgtatcagcatagcaagggggtattcttatggagacgtttcatttatacaaagacattgaggcaaggacaaatggggaaatttatctgggcattgtagggccggtgcgtactggaaaatcaacttttatcaaacgatttatggacttgctcgtactgccgaatatgaccgatgcaaacagtcgggcgaggacgagagatgaactgccacagtctgcatcagggaagacgattatgacaacagagccgaaatttgtcccgaaggaggcggcagagatccagctttcacaggatgtgaaggcaaaagtgagactgatcgactgtgtcggctatatggcggagggggcaaccgggtatatggaaaatgatgcagagcggcaggtgaagacaccatggtttgaccatgaaatcccatttacacaagctgcgaccatcggaacaaagaaggtaatccatgaacatgcaacgatcgggattgtagtgacggcggatgggagttttggggagctaaagcgggagagttacgttgtaccggaggaaaaaacgattcgagagctgcagtcgatcgggaaaccgttcattgtgcttgtcaatacacagaagccatatagtgaagagacaaaaaagcttgctgcatctattgaagaaaaatatggagtcagtgcacttccggtcaattgcgaacagcttcgggaagatgacatccatcatattatccgacagattttatttgaatttccaattgcagaggtggaattttacataccaaaatgggtggagatgctgccgatggaccataagatcaaggcagatctgctcgtacatgtaaaagaaatcatgacggggcttcagacaatccggaatgcagcggacggactgccaaagattgatagtccttacattgaagaggtcaagatcgatgagattcagatggataccggaaaggtgaagatccggatggaactggcagagacattttattatgaacttcttagtgagctgactggaacgaagatcggcggagaatatgagttgattggaacgatgaaaaaacttgcccaaatgaaagaagagtatgagcaggtcaaagatgcgatggatgccgtgcgcctcaaaggatatggggttgtcacaccgaagagggaggaaatccatctggaagaaccagtcatcatcaaacagggcagtaagtttggcgtaaaaattcattcagaagcgccgtctatccatatgatccgcgcaaacatcgagacagagattgcaccaatcgtaggaagtgagaaacaggcagaggatcttgtgcgctatatcaatgagacgagcgcatcagcagagggaatttggaatacaaacattttcggcaaatcgatcgaggaacttgtcacagatggaatccgtgggaagattacaaaaatcaccgatgaaagtcaagtgaaacttcaggattccatgcagaagatcgtcaatgacagcaatgggggaatggtttgtattattatttaaaatgaaaattagtatgctttacacaatgtaataaaataatttttgaaatattgtaaaaagtactggaatatagtaaaattatttcaaaagtgtataaaaatacacaaatttaaaatgggaaatacaaaggaagagtgaggagaggggtatatgaagaaaatactacttgtggaagatgacattgcactttctgccgggctttgctttgaactggaggaggaagattatctgacggttgcagcacactctttgaagaaggcgggacagttgttggagacatcaaaatttgatctgctgctactggatgtagatcttccagatggaaacggatttacattttacaaggagattaaaaaacgatataccgttccggttatgtttttgacgggaagaaaagaagaggaggatgtgttaggaggctatgatctcggtgcagatgattatgtgacaaagccgttttctccatcgatactcaaaagaaaaattgcggtgatcctgaaacgtacaggacaaaatgagaaaagggatcaggggcaatatgacgatggatatctccggattgattttgacaaaatgactgcacagagggggacagaaacattgctcctgacgccgaatgaatatcggatattaaagctttttgtggaaaatgcggggaggatcctgacaagacaggtatttttggaacgactttatgactgtgatgaaaattttattgatgagcatacgctgacagtcaatatgaccaggttgagaaaaaagatcgaggatacatctcataaatatattcagaccatttatggaatgggatatctttttgcgcggggggaagggcatgaggcataaaatgtgtgaaacgatggtgctgaccctcgtgcttgcagttggagggatcgcagttcttttctgtctgcctctgaaccagcaactatttgcgtgtggtgcaatgatcaccgtatgtacagtagtctttgtatgcttgctggaaatgatgcttctaagaaaaatgcttgtaaaacatgcggaaaagttgctagacacgctggatgatatgattgcggaaaaagaggagatcagtttttcggagtatcatgatacattgactgtaaagatccaggatcggatgaaacagtatcatgaaattatgatctatacacgggaggagaatcaaaaggaaaaagaaatgattcagagtatggtatcggatattgcgcatcaagtgagaactccggcagcaaatttaaagatgtttgcagaaattcttgggcggaaaaacctttccgaggagagaaagaaacagttttttacgatgatggaggcacagacagagaaaatcaattttttgatggatgcgatgacaaagatgtccagactggagaccgggcttgtctctttgcatcagaagcgtcagtcgttgcttgatacgcttgctgaagcgatgagcgaggtgatgccgaaagcgatgaaaaaagggattactgtcaccgtttcctgtccggaagagacagaactgattcatgaccggagatggacggtggaagcagtattcaatctgcttgataacgcagtgaaatatacagatcagggcgggaaaatcaaaatagatgtcaatcagggacaattttatacgaagattaatatctctgatactggaaggggcattgcggcagagcatcttaataaaatctttcagcgattttaccgggagccagaggcagaaggagaggaagggatcggtctgggtctgcatctcgcaaaggaaattattgaactggagaaagggtatatcagtgtggcttcggttgtgggggaggggacgacattttctgtctatcttctaaacgagccggattccaccgttccgaaaaggagtgactgataaaagatacagaggaaaaggggaggaagtaatatgatacagctacggaccaaaaacctgaaaaagtattatcagagaggaccacatttgatcaaagcgttggacggaattgatctggaagtagagcgcggatgctttcttgcggtgatgggaatctcagggagcggaaaatctacgctgctgcatttgcttggaggattggacgaaccgacggaggggcgcgtacagattggggaagttgtcttagatcatctcgatgaggaagagaaaagtgtcttccggagaagaaagatcggatttattttccagaattacaatctggcgccgatgctaaatatttatgaaaatattgtattcccgctgacgctggatggaagaaagccggatgaggaactcttgcgttctatcatctcttttttgcgtctggaagatctgctggatgcctttccgggagaattgtctggtggacagcaacaacgggcagcaattgcacgggcattgatcgcaaaacctccagttgttctggcggatgagccgaccggaaatctggatacgattgcaggcagagatgtcatggcacttttgcggatgatgagcaagaagtatggacagactgtggtgatgatcacacacaacgaggagttggcgcagatggcagatcagattatccggttggaggatgggaaaatcgtgggggaacatcatgctggagaataataatggacgggcagtccgccagattattttccggacaatctcgtttcggagagccagaaacacaattcttgtatttctcattttctgctgtatgtctgtgcttacgttgcttggaatgggaattgctgctgaatttgaacatctgcatgcgacgctgttggagtggcaggggacagatgcacatctgattttagagggcgtgacaaaggaagagaaagaacggattcagatacagccacaagtgagaaaaatcggtgctgcagatgtgatcggtgaggtgaaaaatccagaattgatttatcgccgcccgaagatgatctgtccggacaagatgtttctgaagcagaatcgaaggggggcgttgcatggaagccttccggaaaaagaagatgagattgttgttgatgaaacgacattgaccgatctgggagtgaacaaaaaagtaggagaaactgtcaaacttgtctgggagaaggacggaaaaaagatggagtcctcctttgttttatccgggtatctggaaatgaaaggtgcagatggaaaaaatggagatctatggttatctcataaatttgcgcagaaattttcgggaaataggcttcaagtgcaggtaaggtttgcactgccgtttgggattgctaaaaacgcagagaagttaatttctacttgtgggatccagcatgcggaagtggaaatcaacgacgtacagaaaatcagtatttatttgcgaaatctgatggaacagcagaatgaagtgattatgatgctgtttctctatctggcaggctattttgtttttcgcagcatgtttcagattgcagcggtcacggatctggaatattatgggaggttaaagacgcttgggatgtctccgacacagatctgcaaagtatggatgggaagcgggatacttttatgtgcagcgggtgtagttccggggattttatttgcgcttttgtctggaagaattgtcttgacacagaccggatggaatgtatccatcgaacagatccacatccatgtctggctgctcgtacttcatactgctttcctgttttttattgtgtgcaggtgcagcaaaagggcagcgagcattattgaaagctgttcgccgatggaagcgcttcatgtggtctggtggatcatgccgtcaggaaaataccgaaagaagcagactgatcgaaaagagaaaagaattgtccgaatcagagtagaaagaaaaagaagccgaagacggttatttctcacgaagatgggaaagagcggaagaaatgtgccatttttcctcgcggcggagtcgttttggaaaaaccggaagtggacctggaaggtctgtgcagcgcttgcaggaggaatgtttttaatcttgatggctgccacaaaatatcattcttttgatacggaaaaatatttgcaggagacatgtatttctgactttgtcgtgaaagaagcttctctgtgtgggaatgtgggaggcatctataatgagagagaaaataaaattaacgggcagatggaacgggagattctggctctgggtggactgcaggaatacggagctgtattttctaaagaggtttcatatgtgcttccgaaatctgtacgagaacagatccgctccctttttataggagagggagaaggactctttcattatatggagccatatacgcagtggcttcaggaatatgaggaggcgatatccaacgggcagtgtacgatgaggatatgggggcttgaccaggatgttttttcgatgatggaagaaacggactggatcttagatggaacatgggatccggagcagtttgcagagggtggatatgcacttgcagtcggaagcgatcgttctttcaaggagcagccgaactacagtcgaggggaactggtggaagtcgatggccgtacatttaagattatggcgactgtttatttgccagatcggatgacgcagggtggttcctaccacatgtttgtgccggagattgtgattccgggaacagatttccgggagatgtatccgaagaccagtatccggaaattctattttaatgtgaaggatcagaaagaaaaagatgcagaggcgttgctggaatcttatgagaatcgcgttggggcgccgattgctgaggaatcttcctatacattaaaacagagttttcaaaaggagtgcgtccgttctgtttttccagaactggcagcaggagttttactgttctttttagggatttccggatatatcaacacgcaggcgacaatgacattggcgagaacgaaggaatttgcgattttccagagcatggggatgtcgagaaggaagattttccagatgatcttgtgggaatgtctttgttatgtcctgatatcgtcagtgattgcggtgaccgtgggctgtttgtacagtctgacgattcttaagatgagtattcggcaggaattgctttcgaccggatgggtgatgacataccggtttacactgtttccgctgccgattctagtcttagtcggactcatcacagcggtgttgcttgcagtgttctgtttctgccgtagtgagaagaaaagcgtggtagagcggatacggcaaatggaaatgtaagaggacagtgaagcatattttcaggagggatacggagaaacgagagactgcaatctgtgggaatatttgtggatgcaggaatggctggatacttatataacagagcccgaacgtgcagagcgggcattaaaggaattggaaaaagcatttaatatggcatatatgctaaataaaaataggattgtagcggaaaaagaacaatgctataatacaaaaaagcaaggacagatgtctattgcatacatccattgcgggaggagctaaagaaaccatgcagaacatacttgtagtagaggatgacagagaattgaatgaagcattatgctatgcactgaagaagcaggactatcacacaagcacggcattttccatacaagaggcgaaggaaaaatatcagtcattcaccgggaaagaaaaactgcagcttgtgatccaagatgtcaatctgcccgatggagagggatttactttttgtcagtgggtgaaagcacagcaggacattccggttctttttcttacggcaagagatttggaagaggacgtgctgaaaggatatgatctaggagcagaggattatatcacaaagcctttttctatgaaagtgttgctgcggaagattgagcggatctttaagcgaacgcagccggaacagccgggagggtatgatgacggatatctgaagatcgattgggagcgggcaaaagttatggtggatcagaaagcatgtgcaataacacctacggagtttcggctgttaaaagtattggcagaaaatcagggaaggctattgacgtatgagattctgctcgagcagttgtgggactgtgacgggcagtttgtcgataagcatacgctggcggtaaatgtcaaccgtcttcggcggaagctggagaatcacgagcacaaatatatttcaaatgtgtatgggatgggctatcaatggattggatgatggggattggagatcttgttgtgtttgcttctgcctttgtggcagcaggcgccgtcaggaaatccatgaagatgaaacaagaagtggatttgttcgcagatcaggtggaagaggcgattgagcagatattgtcgggaaaagagtggaaagaaacgactgaggtgacagaagatacgctgtggggaaaatgcggtgagaaattttggcagctgtatcgagtatggaaccggaaagaagcggatgccttactggaaaaaaggcagatgaaggcgctgatttcagatatttctcatcagactaaaacaccgctggcaaatatgaaattgtatcaggaatttttgcaggaagaagcattgtctgaaaaggggaaggagtttttaaactgtctggaggagcagactgggaaactggaattccttttgcagagtatggtaaaaatgtcaaggctggaaactggaattattcagatacagaaagagcgcgaaaatctttatcagacattgacggcggcggtcagtcagattgttcccgcagcggcacaaaaagaaattgagctgtatgtggaatgtgaagaaaatatgatgttggactacgataaaaaatggacggaagaagcgatttttaatgtactggataatgcggtgaagtatacaagtgccgggggaaaaatttgcgtcacggtaattcgtcaggaaatctttacgaaaatcagtgtcaaggacaatggaaaaggcatccgattggaacggcaggcagaaatttttacgagattttatcgggaaccggaagttcatgtgcagaacggcgtgggaattggcttatatctgacacgcaggatactggaattgcagaatggatatatcgaagtgcactctgaaatcggaaaagggtcagaattttgcctctatcttccaaattgaaaaaatcacaattttgtgacaatgttagattgtgacaggattgtgatttttctttgctaagataaagatgtgttcgaaaagatacatatgaagtacttagacgaggaggaaagtagatggaaaattatattgtggaaacaagaaatctgaaaaaatattatcaacagggaacgaatacggtaaaggctttggatggagtggattttcgggtgaaggcagaagaatttgtagcaattatcgggaaatccggaagcgggaaaagcacattgctgcatatgatcggagggctggacgtgcctacaagtgggagtgtgattgtaggaggtaaaaatctggcaggacttacgaaagaacagcttgcgatattccgccgccgaaaaataggatttgtatttcagagttataatctggtacaggatctgaacgtatatgaaaatattatacttccagtcgaactggatggaaagcgtgtggatcaggagtttgtacaagaaatcatggaactgcttcagttggaggaaaggcgggaagcgcttccgagtacgctctctggcgggcagcagcagcgggtggcgattgcgagggcattagtaagtaagccgacgctgatccttgctgatgaaccgaccggcaatctggacacagccactggtcatgatgtgctgggcttactgaaaattgtcgcaaagcagtttcggcagacgatcgttctgatcacccatgacaatgacattgcgcagatggcggaccgaattgtgcggattgaagatggaaagattgtgaaaggaagtgagttctatgctgaagaataacaatcaggctgttgtgaaacggctggcaaagaacaatttgaaaagcaatcgaagacgcagcttatctatggttctggcaatcatgttgtcttcatttttgctatttagtgtttttaccgtgggagctacctatttaaaaatgcagagacaacagaatatccgtttgaacggggctgagtttgacgcgatcatgtatggaatttcagaagaacagaaagagattttagaagaaaatccaactgtagagcattatggtgttgtaatggtgtcaggtgtagtcgcagaaacggaggcggacaagacaccgggagtcggtttgctgtatgcagatgatacttactggaagaaaatgatggcacctgccagaaaatttgtgaaaggtcattatccagttgaagaaaacgaggtgatggtgacagaagatgctctgaaaaagtgtgggttttcagacaagaaaatcggagatgaaattacatttgtgtatgagatcaatgagaaaagggaagtggaaacctttcgaatttccggtatttgggatggatacggcgatacagacaatttttatatgtcaaaagccttttgtgacaagcagaagctggatgcggtatattatggccgttgtcatatttccttttgtaaaaaatggatgtcggatgaagcgcagcaggcttttattgacagtatgaaacttaaaaaatcacagcggttattttatgtgtatgagtatggaaatgcaaccgaaatctttctgggactgtcagggatcgcacttgttacagtgttgagtgcctatctgttgatttacaatattatgtatttgtctgtggcgggcaatatccggtattacgggcttttacagacaattgggatgaccgggcgtcagatccggcagttgatgcagaaacagcttttatggattggtggcatcggaatgcttgcagggattctgatcggagcagggacttctttctttctgattccggtcgtagtaaagacattcgtatctgggaaggaaatgggagcggtgcaggtaacctttcatccgatcatcgttttattgaccgtgttgctgactggatgcactgtctggtatgcaggaagaaaaccgacgaaaattgcagtggaaagctcaccggtcgaagcgcttgagtaccgtgtagtctccagtgtgagaaagaggcacaaaacacgaaagggaagtctgattgttcgcatggcattggaacagctgacacggaataagaaaaagacgatggtgactatgctgtcacttgctgccagcctttctgtatttctctgtctgatcacattgctgcacacacagtcggcgcgagagtattcctataattacatgggactggatatggtcttgaaaaatgatacgatcaacaacatggttttgaatcgtgccgcagaaggagaagaacagattcagggagtgcatccgatcttaaatgaagaactcttaaatgagatccgtcaaacagatggagtggaagaagtacttccaactatcacagttcctacaatcgttccatgggaaaaagaggtaacagatgtctggatgcgggagttttatgaaacatggatgaatattccttatgaggacgatatcgaagaatatcagcagcatccagaaaattttggatcttctctggtagggattacggaggaagatttccgggcgctgaatgcagaaatggaacagccggtggatgaggaggcatttttgagcggcaagacttgtattttatatagacatggattgttcggactagatgaaaaggagctgcgcgggaagcagatttcctgtgaggaatatgtacatccggaaaatacccggacatttgaaatcgcaggtatgacagacgtcggggattatgtatcgcttcttggatttccacctacgatgatcgtcatcgatgatgcagtcaaagcgtttacagaaaaaccgatcgttttcagagtggggatccgttatgcggaagaatatcataaagagactgaggatgcaattctttccaatatagaagaaagccccaataaaactgatttttcatgggattctaaaatcgagcaggcagaaaatgtaaaagcggcacaggggcacatgatggaaatcggattcggaatcgttctgatacttggaattataggagtcatgaactatatcaatacttctgtcggaaatatgcagagccgccagaaagaaatttcgatcatggaaagtgtgggaatgaccgaacggcaggtgaagaaaatgcttgtgtgggaaggtattttctatacaggcggggtgttgttcttgacgttaactgttggaattggaattacttatgcaatctatcagacgatgaactatatgggtgccaaattctggttcccggcgcttcctttcctgggagcaacactaattttattcgtagtgtgtattgtagttccggtatggacctatcagaaaatcgaaaagagtggaagtctggtagagcggatccgcgtatctgtagagtaaaactctcaacaatgtttcaagattgtaacatttcagtacctgtgtggtaactttcttttgataagatgttcttagaaaaagaaagaggaggagagagcacatgctggaggttcaaaatttacataaatcgtatgtggttggaaaagatacttacgaagtgttaaaaggtgtcgattttacgattcataaaggagagtttgtcgcggtcatggggccgtcgggaagcggaaagacaacattattaaattgtatttcctgctttatcccatacgaaaaaggaaaagtattgttaaacggcaaaaaactggcgcagttaaaagaagaaaaaatggcagaaatccgtaatcaggaacttggatttgtctttcaggatttcatgctgttagacggactgacagtttttgaaaatgtatgcatcccgcaggtgatcgaagatgcgccgtacgaaaagatggaaaagaaggcgaaaaagctgttaaagatgtttggcatctgggagattgcagacaaatatccggcagaaatttccggtgggcagaaacagcgtactgcggtggcaagagcattgatgaacgacccgcttctgatccttgcggacgaaccgaccggaaatctggacagcagatctagtgaggcagtcattgaagcatttcttgcagcgcaaagaaatctggatgcaactatattcatggtcacgcatgacagcttttcggcaagctattgtgaccgtgtcattgtcatgaaagatggaaaaatctataaagagttgatccgaaccggggatcggagaacatttttagatgaacttctgacagaattaaaaatcattaatggtggtgatggcgatgaagatgagtagcagcagtattttcctgaaacttcgcagatataacaagaaaaattataagcagttactattttgtacctttttttcgatttttcttgtgacatcctttgtctgtgtgttgtacagtccagtggtacaggcaggatttccggagggcggagattcgctgaagatgatcatgatgatctttgcactggcagtccttggatgtctgatctttaatatttatgcggctgggttatttttccggacaaaaagccgtgagaccggagtgtttctagcacttgggatgtcgaagaaacggatcaaaaaagaactgtacaaagaactttgcctgtctctgggaaagggaatcatatccgggattgtacttggagtagtggctgcagtcgggattttgtggatcttgcttcacacgtttctgaaggatattctggagcggaggatgttttcggctgcgggacttggtatcagtcttttctttgcggcggtgacagtgctcatcttattttttatggcagcgcgctatatgaggcggacaaatttgatggatattttaaatgaagagaagaaaaatgaaccgcttcagcttgtaaagaaaggctatggaattgcaggcggaatctttcttgtggtgggtctgctttttggatatgcggggccacagcttaccgccaatttattgaaatttcagatgccggctatctggaatgcagtctatctcgtagcggcagtcggaatctatatgctgtttgtattttttatcgtctatcacaagcgagggaagcagccgcagaaatattatcataacctgatttccaacagtatgatgaaatttcagggaagacagaccgtccggaatatgtgtatccttgcttttctgaccggtgcaacactctacgcaggctcctatatcccagacaagcttgtgatgtttcgcacaatggcagatacgccggtagattttaatctgatttaccgacagacagagcaggagatccagaaggaagacatcgaggtgatagcagacgaatatggagtgacgatcacagattatcaggaagttctttttgcagaacttcagacatccggggtcgagagagactggacagatgatgggaagctgatcgaagattattatgagacatatgcctatggagaatttatcagtgcatctgtctatgcgcagtataccgggacaaaagtggaggtagagccaggaacatttgcacagattatcctgccggagcagacagaaaacttctgggagaaatataccgatatggatcttgtgacaaatcaggaaaccggagcacagctgaatctgaaatttgccaaaacagtggaagaccgcatgttttaccgtgcaaatgtacaccgctatattttaaatgacagcgacttccagacgatcacggcacagatgacagaacagcgccagatgaaacagattttctttgatgtggaagagagtgaaaatgtgtatgattttgcaatcgaacttcggaaagagtatgtcagacgtgcaggcaaagatatggcagtgttgaatgcatataacgaagctgaagaggatcgggcagaagctgccggagaaccttatcactatcggatgacagagccgatggatccagaagatccgtatttataccatgactggaaattcaatccggagattcaaccgatccagatgaaaacttatcttcacgagagtggaattatgattttgacatttctctatgtctcctgcatctgcctagcagcaatcggcatcatcgcttatacacgaagcgttacgatcggtgtgcagaatcagaaaatgtttgacgatttgagaaaacttggtgcgaaaaatacttatatcatgcgctgtatcaagaaccagctccggaaaatctttgtgcttccgacggcaatcggactgtttctgatcctatcatttctgatgatcatctatatcggaaatgataaaagaatccagagtacggagtggatgtcatttggatgtacagtaggatttgcagttataatctgtatttaccagctgattgtttaccggatgtcactgaaaaagctaagagaaatattaaaattataaagctgttaaacctatatacaattacaataaggaagaaaaaaatccggtcgaggatgtatctgcggtatgtggcggcagatccctgaccggatttttcttgtcaggagaaggataagacactgtcagaatctgttgttacaatatatgaaaaaggtacaaaaaacagtgacggtttattttgcgtatgatataatttttgataaagaagccgcaaatctgtaagcgtgaaacggagatgaaatttatgtggtttatatttgcactactatcagcaatatttgcatcattgacctcgatactggctaagattggtattgatggagtaaattctaatcttgccacggctataagaactgttgtagtggtaatgatggcgtggggaatggtatttttgactcatacacaaagcggattatcagaaatcagtcgaaaaagctgggtatttttgattctatccggattggctacgggagcttcctggttatgctattacagagcgttacagatgggggaagcttcaaaagttgttccaattgataagttaagtgtagtcattaccttggcacttgcctttattttcttgcacgaaaaatttacaatgaaatctttgatagggtgtattttaattggtgttggaacattagtgatggttttgtaattaaatatgaaagaatattaggtattcattcaaaacactggttgaaagctgttatatagccaatcaattctattttaatttgcttgagtgaaacattcgatactctgtcggtaaaactttgtaatattctttaaaaactttagaaaatttgctttggctttcatatcctacttcttttgcaatttcctttatactttttggtgtttccattaacaaacgggctgcaaatttcattctgtgttcttttatatgtgaggcaatagaagtaccatatacatctttaaagacagattttaatgtagtaggattgataagatacttacatgccatttcatctattgttattcgctggctcagattatctaaaaggtatttgtggatattgcgaataatttcaacttgttcagattgatattcagataatctgttttctgtatcaatagataatttacttagatatagtaagagttctatcacctttattcgccagtatgcaagttgaaattcttttggctgatgatagaatgctgaaaagatagcgtcagtttcttcattgccaatgaaaactgaaaaatttccatctttacaaaatttattaagtatactttctcctgtaataccagtattttttaacagttctggtgttttttctgaaaggatatttaaatcaatataaattttgattccttcatagtattcattaggtaaagttattatagaagcagaacaatattccattgtgtgcagtgaaaaatcgtgttcacctaaataaatgctatttccattggccattttccacccaattcttcccttatgacagtaattgatttctaatatatgttttaatggctcatgtgtatcagtttgttttctgccagtcaatgacataaaagcaagatttataccttcatataaatcataactagcgagatgatatttctgagaaaattcttgatcacttttttctaatggtacgatttcgttgttcataatattatttactccttatgttcagggcatgtaatcattaaaattttttcaatcattttatgtaacagtatactctgttctgtgtttgatgatttataataaacctcttttcctatgcgcctgctagaaatcaatcctttgtttcgcagtactctaagatgatgggatatggcagggcttgtcattttcatcattgcagatatatttaagacacattcctcacaatgacataaaagccaaaataaacgaatacgtgtaggatcacttaattgtttaaataattctgaaacgatttgaaagtgttggatatcatcaagctgttctaataacgcagtatgatctgtttcgttatgatggttatgtggtaacttcgtataagacatagacaattttcctttcttttgctctatttagaaatgtgtttcgcccgtttggcaggtaatcacgtatctctattgattttaggctacaacagaattatactatagctacaacgattaaacaagtgcttaattgttaaatgaaagtttaaatagcaatcacgaaaggagatatttatcatgaaaaaaacttacaaaatcgaagttgactgtgcaaactgtgcaaatcttatggaggatgcagcaaaaaagacagctggagtagcaaatgcaactgtaaactttatgacacaaaaaatgattgtggagtttgaagatggaaaagaaccaaaagcagttatgaatgatgtcttaaaggcttgtaaaaaagtagagccagattgtgagattgaactttagaaaaaatgcacccctatgtaaaagcaaaaggggtgcaaatttaaaaagatcatatgaatgattaaacatatatgaaataaatacgaggaggaatgggctgtgaacaaaaagcagaaaaaaatgttgacaagaattattattgctgcagttatgataattgcattgaatttaatacaggtaacaggcattgcaaaattagtgctatacttggcaacatatttaataatcggttatgatattttaaagaaagctggaaaaggaattataaatcgacaagttttcgatgaaaatttcttaatggcagtggcaacaataggagcttttgcattagcaatttactctagaagtggagattacaatgaagcaatcgcagttatgttgttttatcagattggagaatggttccagagttatgccgttggaaaaagtcgaaaaaatattagtgcgttgatggatattcgtccagattatgcaaatatagaaatcaatggaaaattagaaaaagtagatcctgatgaagttggtgttgatagcataattgttgtgcagccaggagaaaaagttccgttagatggtattgtaatagagggatcatctagccttaatacaagtgcattaacaggtgaaagtttacctcgtgacgtgaaacaaggcgatgaaatcatcagtggttgtatcaatatgactggtgttttgaaaattcaaacaacaaaagaatttggtgaatccacagtttcaaaaattttagagcttgtggaaaattcaagttcaagaaaatccaaatcagaaaactttatttctaaatttgcaaaggtatatactcctgcagtctgttatggtgcattggcattggcattattaccaccattggtacaaatgttgtttttaggccaaacagcacaatggggagtgtggatttacagagctctgactttccttgtaattagctgtccatgtgcattggttatcagcatcccacttagcttctttgccggtatcggtggtgctagtaaagaaggtgtgttgattaaaggttctaactatatggaaactttatcacaggcaaagtatgtagtgtttgataaaacaggaactttgacacaaggtgtatttgaagtaagtgctgttcatcacaatgagatggaagaaaagaaacttttggaatatgctgctttggcagaatgtgcgtcttctcacccaatcagtaagagtttgcaaaaagcctatgggaaagagatagaccgtagtagagtttctgatataaaggaaatcagcggacatggaattattgccaaagtagacggccatgaggtggctgctggaaacagcaaacttatgaaacaaataggtgtggattattatgattgccatagcgttggaacaatcattcacatggcaatcgatggagaatatgctggacatatcgtaatttctgatatattaaaaccacattcaaaagaagttattgcggaattgaaaaaagctggtgtagaaaaaacagtaatgcttacaggagacgcaaaacgtgtggcagaccaagtggcacaatcacttggaattgatgaagtatacagcgaattacttccagcagataaagtgttaaaagtagaagaactactttccacaaaagcagagaaagataaactagcctttgtcggagatggaattaatgatgcacctgtattgactcgtgctgatattggaattgcaatgggtgcaatgggttctgatgcggcaattgaagctgctgatgtagttcttatggatgatgatccactaaaaatttctaaagcaatcaagatttcgagaaaatgccttagaattgtatatcagaatatcatctttgcattggttatcaaatttgcatgtcttggactaggtgcaataggtattgcaaatatgtggtttgctattttcgcagatgttggtgtcatgattattgcaatattaaatgctattagagcattaagagtgcataatttataatttagatgaaaatgcaaaaacttattatagaagattgcttgcaattggtggaatttttcaaaacgctgggagattttacaagactaaggatagtgcttgaattaaaaacaaaaagatgtgttggagaattagcggaagaattagagatgtctcattcagcagtctcccaccaattaaatatattaaaagctaatggtatagtaaaaagtcaaagacaaggaaaatatatttactatatgttacaagatgaatatttacaaaatactattgaaaagtgtaagactttatttgataaggagttttctttgtagtattcagctttaaataagatgatagagataaaaaatgaatagaaaggcgaagtgctccagacacggcggtgggaaaatcttttagatttttccgccgtttttaagttgatttcaaaagaaaaataacaagtgtggaattggaaacagaggaagacaaagaaggcaatcgcataaaatcggtgcagttgtaagaaatagattgaatgtgaaaaataacccatgttatactttacttacaagcaggtattgtaaatatggttagttataaagcaggataactgacatgaaacaacagatttacaatactacactttatcttaggttgagccgagatgatgaattacagggtgaaagttccagcattactacacaaagaagtatgttgcgtccatatgtaaaagaacctcatctcagtattgagggaacaaaatggattattgaaaacatcttttttcttacgaggaggtgtgctgcaatgaaaaacagatggaaacgagtagtgggaattgccattccacttgctatcattattgttgggataagttataacagttatatcagagtgcatacttttacactttcaggtaacgaaacagtaaagagtgagcaaatacaacctgttaatggaagagtaaaagtaaatggtactgttgatacagaggtcagatttacagatgttgaaactgggaaaacttatgaaatcgattatattacatctggggtatcagaaacacttcatctagaacgaggaaaatggtacgaggtagaaggtgctggggaacttatagtgagaccagtcaatattcgtatagaataacaattttcatcaacacgaagatgaaaatttgcagaaagagagtagctatcatgggaaaaaaatatttcaaagtaatgttggcggtattttttctagttttatgtacgttgggaacaacaggttgttcttccaaagaatcagaagattcaggggcgatcggcaagggcaaacgaatctttgaggaaacaatttccccgaataaggattatgttgaaaatgaaaaagatgttgtctatcatacagtagaaatctatcaaaatagcgataatgtgattatagtgacttcaaaatccacttcagcatttttcaaaccattgcaatatgaagtggaatctgacacaagtatcacaaaatcagatattgatgtagagtggacaacttcaatgggaaacccggatccaacaaaggaagatcaattacatatagcttgcgtatctgtttcgcaaaacggaaagctattagacaagagaaaaataaattttgcgaacggagcttttgaaatcattgaggatgtaatagagagcaaatagtcagatagtgttttcttataaacacaacaaatttgtaaaaacggttgaatcaattaaagcttgaaggaggaagttatggcatttgattttaagaaagaatataaggaatattatatgccgaagaataagccgcagattgtagatgtgccgaaaatgaattatattgcagtgagagggtcgggagatccaaatgaagaaaatggggcatatcagcaggcaatcggtatactatatgccgtggcatatattctgaaaatgagttataaaacagaatataagattgagggctttttttgaatatgtagtcccgccgctggaaggcttttggtggcaggaccgtcatccgtttgccggattttgtttccaaagcagattttgcctgggcggtagagacagcgggtaaaaagaaaaaaatcgattgttcctcagcagaatttctgacggttaatgaaggattatgcgttccgattatgcacttaggttcttttgacaaggaacctgaaacagtggtactgatggacgcgtatatagaacagaatggttatgttaatgacattaatggggagcggctgcatcacgagatctatatgtcagatgcaagaaaagttgccccggaaaagtggaaaacagttattcggcatcccattaaaaaagtgtgagaaattttttctactttataaggtttattagataacagaaaaagaatgatataatgtaaaataatgtttgttgaagtttatttgatttcagaaggcaggaaaatgtacacactggtaagaaaagaagaaaaatcgaaaatatgaacatctcttttatatacgagaaaagcctcaattagtaggttatacaaattatagggatactacagaaagatttgaatggaaaatagttgatgaacatatatgggaatggaaacaaacaaatagaaattacagagtattagattacattcctatcgttaatacagcgaaagcttttttcttagaattaaaatacaaaatatacaaagataaagaggaagttggcaaagcatttttttacggggtttcaaaaaacaaaaatgaacgtgatttttttgttatcaatgataaaaaatatttttgttgtccaggaaatacagatttggttcgtcctctaaaaaaatatttgtggacaatagagaatatagagcgtcaatgtgttgcaaagattgaaaaaattctaacaattcagcatatgtaatcgaaaaattagatttggaattagaacttgaatgggttattttggcggttatgcacatggacatggctgtattttcacgtgagggcagaggaccggttacggcaggataaaatgaaatgcattcctatttgaaacggtttacctcgttattttccttaacaataaaaagaaacggtggagtgataactatgggagttataaaatcactttttgaaatgtttatacagactataccatatttagctgtatttctgttcgggtgggctgcggtagcaagtgctattcaacaagatgatttatttccgccactcacttttagtatcttttttacgatttctttcattggatcagtgaatatgatgatgtggaaactcgaagtgaacgaagatgaaattacatggcgttcaacttttgggagaaagagaacttttcgttttgaagatattacgcaatgtgagagaaagaaaggttctatatgtgtctatgtcaaaggacaaaaattatttaccattgacagtaatatcgacaaagaagaatttatggcagatataaaaaggagaaaaatacctataaaatcttattgggtaaataagtataaatgacaaagatcttatagtttatatttagaataagaagcattaaaaatttgaatttgtgaaatcgaggatatgatatgggcggacgaatgataggatttatagtatgggcaatcgttggttgtattctgattggcataggagtatgtgcttatttttcaaaaaagacggttgctttttgggcgaacatgaaggcttttccagtgagagatataaagggatataatcatgcactgggtaaattgtttattttctatggaatgctttttgttgtgttaggaatacctttattaagcgctcaaaatactccatatattttgctgtcagtatttggtgtaatgattgaaacgatagtatttatggtaatttatagcttgtttatcgagaagaaatataaaaaacagtaggacaaggaagtgatattccatgaaaaaatttttgaaaatattgttcatccttattggaatcgtttttctgatttttgtagttctgataggtattggattatttgttgattttgaatatgatgaccacattgaaaatggtcgttatacttatattccggaggaggaaaataaagataatgagtatgtagcatttacgatgagtgattatgataaaaatgattcagagcttacctattacgactctatcgaaaaagctattttacattctcctctcaaagcagaaaatgaggaactttctgctccggatgattttcttaatcatgtggatgaaacttttcatatatggaatggtgagcagtatgatacgattttttatcgggcaggaacaaatgatgatccggtgcagggattcgtattcgcacgcttaaaaaagcaaatacaaaatggaaatacacgctatgcgtttatcacttccacacaagttactgcgaagccggacagtagatatagctcagattttcataagtttcttcattctattttaacattgagtgattttcaacaagacttaaatccaaactatccggatactcgttttgtgtttggatatgcgcatgaaaaagaaatctatacattagaaatcgaaggacaaaagccggacggtgtcattgaaattgatgaatatggcagagtgacctatatgtggtattacaatgatttaaagagcgataagagaggcgactgcctgagttattccatagatgtacctgagtaaaatgccggtttaccggtattggtaagaaaaaggaaaggatatccagtatgaaaaaagagaaaaaacagattttatatattttcacatttttgattttagggtgcgtgatcggctattttgtagcagttacgcagatgaaacaagtcaatgatcccgaatatattgcattttgggcaagtcaagacatgccggttccggaaccgatcggatttccgcggagcatcatttcgtttggaatgcttttttccgggatacctgcggggttgatatttttctctcatatcgctaaaaagtggctgacttcagctgctcctaaaattattattgggtttcttacctggcctatttacacacttgccggggcagtcggggcaattccactcgttgtttatttgatttatcggttatggaaagggcggatattatgtcaaaaatgcaaatagcgtggttaggatttctagtggttggaggggtaggagtacttttcattttctctggagtgatgataactatcgtaacaaagaaacaaatgaagcagtgtacgaaaaagatagaaggcgctgttgtgcaatatcagtttccgggtggcggaagtatgaatccgattgtggaatatgttgtggatggaaatcgttacacagcaaagaaaaaatttcgtgggatattgacaaagaggatatctggactatccgtacatgtagcgtcaggcgtctatgaagatgaaaaaggctggttgcatataaaaacgggagcgattgcaaacttgcgtgaattagcagaacagctgtggcctattggcagcaagatgaccgtttactataatcccgatcatccgaaaagatgttatgtggacagacctgttctgggaagcacgatagctgctgtatttattgtaacaggtttgatcatactgattttaagtgtgttattatttgtgctgatccaattataaatttgaagagatatcatgctattaaatagattagaatttgtgtgatagaaaaatttgattttatgaaacaaatcgatttcttaagaaaaatatgaagtttaaaaataaattgcaaagggggaggattagtaaaatatgaagaaagataaaaagcaggaactgtttattcaagattataaaattttattgagaaaatattataatgacattaatgttaataaacgaaataaaggaaaattgaaaggagcattagttgcaaacttaatcaaaaaatatattgaacaaattattatggattataaattaccttataaggtatctggaaataatgtgtatatttatggatatgcagtggaatgcgatttgttaatactaaaacaagatagcaaagcaatttttgaagcaccagaaatatatcgtgcagaggatgtaataactattattgaaagcaaggcaacaggtatttttattgataagaaaaaacctaaaaatccttttttaaatgaactgtgtatggttaaacaattaaatgataaaggtgttggtgttaagtttgcttacatttctcttgcagagcagatttccggcagatcaagtaggttgctagatgaggccaatagatatattaatgagtattcaaatgaaaaaaaccaaaataagggagtgtattgtttttcaaaaacatatccagcagatgaatatccattgtatgaaggaaatccatattcttttgacgagtatattaaatatttgtgcgatgatttttcataggcatactgaaacttaagtaaatagaaaacaacaatttccagtttttgcaaagcaaatacatatgataggaaagagcattatgttattggatttaatcttttggaaatatgaggactctgtaaattatcaactataggatatatatgttaatttgcgttgcttgtggcaatggctgttgtcggtgtggatcatggctggtctggaatgaaacagttagtcaggtatttataaccggagtaaaggaaattacaacggaacctgcattttacaataatgtagtagagtttaacggttcctattacaaggtaggcggtaagcaacttgaggtaagggatttgaaggtagaaaatgataacttctacattctcacattggcggagattgcaaaagagttaaacagacgaggaatgagaaatgcaaatattctcttatccgtagggttgcctcttacaagatttggagcagagaagctggactatcgacattatgcccattgaagattctgcaccgaatgaagctgagtgcatcacaatcagggaaggcttgattaagtgcatgaggacaatcaacgaggaatgtatgaggcagtatggtaaggagctttcggaggaagatatacaggaaattatgagaaccggaaaacatgagagacttcctcagaagtatctgaccatcgtggaagaatgcctcagagcttatgtagataaggtttacaatattcttttggagcatggctacaaccttgaagtgacagagattgtatttgtcggtgggggagctgctgtcatgaagcgttttggaaactatgacggtaataatatccaatacatattctgcagtttgcaaagatggcagaagtcaatatgacttattatgaaaaggattactatgcagttccggatacaggggcggagaaagcgtatgaattgttaaggcaggcacttttagcacaaaaaaaggtagcaatcgcaaaaatagtgatgggaacaaatgaaaaacttcttgtgctgtaccctacaaaggaagggattattgttaaaaccttgttttattatgatgagattgctgccattcctaagagcgttccaaggatgaagttggatgggttccgatgtctggcttatatagattacggtatggtggatcttcgtaataaacgcaatatacgaatgctcccacggtccccagagctgaaagaaatcagtaaaaatgtaggaggacgatgcatattagatggcgaaatcgttgttttgacaaatggagttccagatttttatcgcctgcaaaagaggacgctgctcacagacaaattcaagatagagatggaagcattgcgctatccggcatccttcgttgcctttgactgcatttattatatagaaggaaaagaactgatatggacacccctgatggacagaaaagaacaattatcccgacttgtgaatgaggattcgagaatagcggtgtccagatatgtggaaggttcggggactgcgctttatatggcggcagaggcgagcaaactggaaggcgttgttgcaaaaagaaaagacagcttttatctgatggggaaacgaacgaaggactggatcaaattcaaacggatggcagacgaggactttgtagtagcaggatatatcaaaaaaggcggacatatgtatagccttgttctggcaaaatacaaaggtaatacactgattttcagagggtatgtaacatctggcgtgacaaaagaagcaatagatactttggaagtgactggcaagaatccattccttttgatgcctattggggaacatgatgtaatctgggtgaagacgaaccatgtatgtgttgtggaatatatgcccaatctcattaattcgctaagacagccagtatttaagggttttcgtgatgatgtcttaccgaaagaagtacaggcatcagaagcataaaataagagaaacaaattggtaagagtcgataaatgaaaaagaatgcacaccattatgtacggagtgtatccttcaagtggaacgcaatggagatagaaagggagaagttttaccattgcaaggttaaaaggggattaagtataagttttgatgatttcttcggcaatggttcgctttgcaatacagcgatccattgcctgtttttctatgtaacggtgagcatcaggttcgctcatggagagttcactgatcaaaatccattttgccttgttgaccagacggatttcagccattttttcttcgatggacagagacttcctttcaaattgtctcagtcgttctctggcgctttccatccagttaagggcatgcagcatagttggttttgaggttggctttggcaaagtgaagacgccgtactcagcaaccttatcgtggataccggaatgaacatcactttttaccaaaagcaacacagcggacggtttggtagtacaggtgtcaattgcaaaacgagtacccacatcatcaggcaaaggggcgttgatgataacaaaatcaaatgttttttcggcaagtgcccgtttggcagcactgacacttgtaacattatggatagggtagtatcttgtttcggggagcaggtcagcaaaggcagaggtgaaactatctgttgcagacacgatgagtatgctgtaaaaacgttctcttaaactcattttacacctcctccttttttcgttggtttgaattatttattgcaataaatatctaagatagcatctggtatatgttcttttataaaattactgtttacggctgcagcacatgcggatttaaaatcgccgggcagctgctcaaattttgccagcgtatctgcatctgctttatacaggttcatatcagcgggacctggtagttccagtttattctgaatgccatccataattgcataaatcagcagggcaaatgcaagataagtatttgcggatggatctggagagcgaagctccgcacgttggtatttgcctacagcagcaggaaccctgacaagctgggaacggttctcgctggaccaggagatatatcttggagctttattgctgccaaaacgctgataagaattttctgtcgggtttaaaaatacggtcatatctgcaaccttatccagaatagcagcaatcatataattcatatagtctgtattatcagaggattttacagatatattgatatggaatccgtttcccggtttatcttccagtggcttcgggctgaaatcagcaaaaagcccattacgtctggcgattgttttcacaacagtctggaaggtcatggcattgtcagcagcagtcagtggatcggaatagcgaaaatcaatttcgttttgtcccggaccttcttcgtggtgagaactttcaggctgtattcccatctgttcaagtgtcagacatacttctcggcggatattttcgcctctgtcttccggggcaatatccatatatcctgcgatatcataaggctctttggtcgggttcccattatcatccagagtaaacaggtaaaattcctgttcagcaccaaagaagaactggaatcctgcattttgggaatcctgaattgctttttttaaaatagaacgggtgtcacattcaaatgtttttccgtctgggtgggtaatgtaacagaacattcgtaccacacggccatgctctggtctccatggcaggggcataagtgtgtctgcatccggatggagaaacagatcggaatggttttcatcgccaaagcctgcgatggcagatgcatcaatggcaattccacattcaaaagcgcgaggaagttcctctggcatgatggatatgtttttctgtttgccaaatacatcacaaaaggcgaggcggatgaattttacatcttcttcccgcacatattgcattacctcttcttttgaatacttcataagcctacctactttcttttaatttgctacatacatttgtttatatgggtttttgctgtctggtgtgatgactgtaaaaggagcagataaaagttcgtccacagaatatccgaagtctgcacagtattcggacagatattcccggatttcctctaaatcctctggggctgcacgtcttgcagttacctgttccggaaagctgatatcctcacaattgccgcgtaggaacattttaccgccatgcattccggtacatgggaaattgcctacgatacgtttgtcatctgtgtgaagtccaaggacgataattacgccgccagcctgatattccccaaggaagcttccggcacacccaccgatgatcatgacaggtatcttttctttgtatgctttcatatggattccggcacgatatcctgcattgccttgtacatagattttgccgccacgcatggcataaccggcagcatcaccaatattgccatggatcaggatctttccttcattcatggtgtcgcctactgcatcctgagcattggcatttacggtaatagtggcattgtttaaatatgcacccagtgcatttcccggaattccattgattgtaagattccgatcagacataccggcagcgatgaatctctgaccgcaacagccttcaatcgtacagttgcggtctgtcccacgtagtgcttcatttacagctctgtaatctaaatttgcagcatcaatgattttcatattataccacacctccaaaaaattgtttacgcttttctacggaaaatgctgtagaagtagcagtttttttcaacatttcaaaatcaatggaacttaaaggaatacgttctctaattaaagaagtataaattccagcccgttcagttgccccgataaggataaatccggttaaatagtcaccgctggtaaacagacgttttaaagttccttctgacttttcctcatacagttcgcagccctgttcagcggtatagtagcttccggcggtcatggcatgtaatccaaagaaaccgatggagttcatagggattcctttatcgaaaacagaagaaccgcctgccatattgatgccagcacaatttccttgcatataagcatttggcaaaatggcaaggacacgtttatcgtggaacgaaatgtcttcgccttccgtacagtcgccagcggcataaatatcaggaatggaagtttccattttgttgctgattaaaatgccacggttcacttcaccaccaattccttttatcaaagaagtgtttgcacgaacaccgacagcaaggactaaaacatcgaaacgaacggtttttccgcttttcataaaagcagtatttttatcgaaagatattgcactgtcatttaacataaagttgattccattttgttccagatgtttttgcattatagctgcgcagtcagcatcaaggatactggaaagcacacggtctgcaaggtcgcatatcgtaatactggaaacacggtcttttaaaccttcggcacattttaaaccgatgagaccggcacctacgatcaacacatccgaattttcattgatggaagcttccagttccagcatatcatctatcgtcataaaggaatgcttctgttccactgattccagacccgtaaaaggaggtacaaaaggagaggaaccagtggcaatgcagagtttatcataaggaatcacggtatcatcgtttagggctatctgttttgtggaaggatcaatttgcacagctttctttccatagagaacttcacattccattctttcataaaaattcttatcacgatatgccattctctccagattcgttttgccttccaaataataggagattagtgggcggcagtatacaggatgcggttcttttgaaattacgatgatcttgcccgctgcatcctcttttcggataccttcaatgcagcccacagcagcaacgccatttccaatcacaacatattgagtcattctactcacccctttcttcatagacgattgcccggttcggacagccttttacacaggctggttcacagcaggtattagcaatgcaaagttcacatttttgcataatgcctttttcattcggtgccagtgccccatatggacagaccagaacacaggtaaggcatcccacgcatttgttctggtctatatggacaactccgtcaatctttgagattgcacctgcaatacagctttttatgcataatggatcggtacagtgtctgcaggaaacggcgtaacagattttttcgccttcttcaatatggatacgaggaaagattggctttctttttaatgcttctgtcatatctggtttgccggaattggcaaaagcacaattatattcgcataaatggcatccgagacaccattcttcttttacatagattcgtttcatttttatcaatctcctgcatgagagataccaagtatctcaagctctttttctgtcagaccaatgccacgcagcatcagacggtttcctcgtaaagcctcgatggaattgatgcccatgccacccatcagttctttgatttcgtgtttccatgcggtcataagattcatcaggcgttcgcttcccatttcaggattcagtctctttacaagctctggacgctgggttgcgattccccagttacatttaccgctttggcaggttcggcaaaggtggcagccaagagccagaagggcagcggtagccacataacaggcatctgcaccaagtgcaatggcttttaccacatcagcagcactccggatacttccgccgactaccagtgatacattgtttcggataccttcgtcacgaagtctttggtcaacggaggcaagtgctaactcgatgggaataccaacattatcccggattctggtaggagcggctcctgtaccgccacggaagccatcaatggcgatgatatcagctccgctgcgggcaataccacttgcaatggcagcaatattgtgaacggctgcgactttaacgatgacaggtttcttatattctgtagcttctttcaaagagaacacaagctgacgcaagtcctcgatggaataaatatcatgatgcggagccggtgaaattgcatcagagccttccggaatcatgcgggtacgtgatacatccccgacaatttttgcaccggggagatgtccgccaatgcccggttttgctccttgtcccatcttaatctctatggcagcacctgctttcaaataatcctcatgaacgccgaaacgtccggaagccacctgtacgatggtattctcgccgtagcagtaaaaatcttcatgaaggccgccttcccccgtgttatataagatgccaagctcagtagctgccagtgcaagggatttatgagcgttgtagctgatagaaccataactcatggcagagaacatgacaggcatggaaagctccagctgcggcggcagtctgcagtctaattttccgtcctctgtacgactcactttttggggcttctttccgaggtaaactctggtttccatcggttcccgcaagggatcaatggaagggtttgttacctgtgatgcattgatcaggattttatcccagtatacaggcagtggtttgggattacccatggaagataaaaggacgccgccactgttcgcctgcttataaatctccttaatcgtatcgtttgaccagtttgcgttttcgcgcagggtacagtcactctttacaatttttagtgctctggtcggacaaagagaaacacatcgctggcagttgacacatttcgattcatcgcacttcataattttatgttcttcgtcataactatgtacttcattggcacattgtcgttcgcatacccgacaggcaatgcatctgttttcatttctgattacttcaaattccggatagataaattctacgctcattaaaatgcaccttcctttacttttacaatgactggttcaccaccggcaggagaccatatgttttcggcattcggttccatggttcggatggcagcctcttcactggcaatgaataccttgtcgtctttttccccgactaccatagaacgcagtttcaaccggtcattcagtgccatcagtccgccatcaaatcctaaaacgatagagaaaggaccggtcacaagcagacttgggaacatggttctaagataggtgtgttttttctggtcttccaaatctgtttttgctgcaatggtactccagaatggggcagcaataacacttgcagcttcaccaagggtaagtccctgtacacggagcagataatccataatataggtaatgacttcggtatcggtctggagcgtacatttgtagccaaacatttcgataaatcggcggttcgcatcataagaggaaatttctccattatgtacgatagaatagtccagcagcgtaaacggatgtgcgccgccccaccatccgggagtgttcgttggatagcgtccgtgggcagtccaagagtatccttcatattcttccagtttataaaaaacacccacatcttccgggaaacctaccgctttgaaggttcccatgttcttgccactggagaaaacataagcaccggacatttcggcgttgatcttcataacagttctggcaacaaattccttttcgtccagctgtaaagaaaccagcacggattttagtggagcaacaaagtatctccatataatcggttcatctgtaatagccggaatcttgcgggtcggaataatttcggattggatgatttcaaatcgttcttttaagaaagcttcacattcttttcttgtgtcacgggtatcaaagaacatatgtaatgcataaaactctttatattcagggtaaatgccataaccggcaaagcctccgcctaatccgttggaacggtcatgcatgggtttcatggaatttatgatcatttcaccggacatcttgtttccttctttggaaatgactgctgagattgcacatccggaaggaattctcacttgaccttcagttttcatataccatataccttcctttcagaataaatagaaaaacaaaggcgtccattttaagggcagaaaaaattctactctaaaaatgaacgcctttgctcatattcaatatatatacagcagatggtaagttttgtcaagaaacaatgtatttcacctcgcagttgttattttttcatacttgctatataataattcaaaaaatgaggatacgaggtgaaaatatgaaatcgcgcagtgcaataacgcttattggaagtggcatgccagaagtaaaggtatgcgatattgttaatggtaaacctaaagttaagcgaattgaaagagaagattgtatagagtttgttcgaaaatattccttgtttcataaagaaataaagcgatacgataaaagaacttttgaacaattgcaataagattaaacttatatgaattaaaattggaggagtaattatgttttctctggcgttctataaatcggcagatggaatgacctggaaaaagtcgagtcgggaaaaggatgagtgaaaaattaaaaaaagggattgacaaatgatttttccgggtgtattatccaacacgtaaaggcaaaggcgtctttgagatgaaattctcagaggcgctttttactttataaaattaaaatagatgcaatttgattcaaaaggcaagggcgtcttgagtgttgctaaagcatccgtaggaagctgccggtggcaggttctgcaggtgcagggaaaagtaccatgaaagacaaccttgcctttttattttcaaattggaaggagtgacattatgaagaatgtttcagaattttttggatgtaaagtttttgacgacagagtgatgaaagcaaatttgtcagcaaaggtttatcaatctttgagaaaaaccattgacgaaggtgcaaagcttgatattagcgtggccaatgcagttgcagcagctatgaaagattgggcagttgcaaatggagctactcactatacacactggttccagcctcttaccggcgtaacagcagaaaagcatgacagcttcatttctccatccccggacggcggcgtgattatggaattctccggaaaggaactgatcaaaggcgaaccggatgcatcttctttcccatctggaggacttcgggctacttttgaggcaagaggatatacagcatgggatcctacctcttatgcgtttatcaaagggaaaacattatgtattcctacagcgttctgttcctatggcggagaggcattggataaaaaaactccgttgcttcgttctatggaagctttgaataagcaggcgcttcgtattcttcatctgtttggaaatgatgatgtgaaatgtgtccgtacatcggtaggaccggaacaggaatatttcctcattacaaagaaaatgtatgaacagagaaaagatcttcgatttacaggacgcactctttttggtgcgaagccgccaaagggacaggagatggatgatcactattttggcgtgattaagacaagagttgcggcttatatggaagaactgaatgaggaactctggaaactgggaattctggctaagacagaacataatgaagtggctccggcacagcatgagcttgcccctatttatacgacaacaaatattgcgacagaccataaccagttaaccatggagatcatgcagaaagtggcagcaaagaatggacttgtatgtctgcttcatgaaaagccatttgccggagtaaacggtagtggaaaacataataactggtctcttgcgacagataaaggcgtgaatctgttatctccgggagagacaccgtatgaaaatgcacagtttttattattcctgtgtgcagtgatcaaagcagtggacgattatcaggatctgctccgcctttctgttgcaacggcaggaaatgaccacagacttggtgcgaatgaagcacctccggcagtggtatctattttccttggagatgaattaaatgcggtgcttgaagcgattgaaacggatactccatacgcaggaacgaaaaaggcacagatgaagcttggtgtggatgtgcttccaaaattcaaccgtgatactacagaccgtaaccgtacatcaccttttgcatttaccggaaataaatttgagttccgtatgttgggttcttctaacagcattgcatgtgcaaacatcatgctgaacagcgcagtagcagaaagcttgaaaatttatgcggatagactggaaaaagcggaaaactttgaagatgcattacatgcaatgattcgaaagaccatcaaagaccacaagcatatcattttcaacggaaatggttacgatgatacatggatcaaggaagcaacggaagagagagggcttctcaactaccgtacaacaccggattgtatgccgcacctgctggatgaaaagaatgtacagatgctgacaggccataaggtattttctaaagctgagctgaaatcaagatgtgagattatgctggaaaactattgcaagacagtgctgattgaggcaaataccatgattgatatggcaaaaacagagattgctccggcggtaagtgcatatgtactggagcttgccaatacagcagcagcgaaaaaagcagttgatgcttctatttcctgtagttatgaagcggggctgctgaagaaactggcaagactggaagaccagattgcggttaaagccgatgaactggatgatgcagtgatgaagcttaaggatgccggagacattgaatcagaatcttatatgattcgtgatgttgtcttaagtaaaatgggtgaactccgagttgcctgtgacgaggcagaaacaatgacagcaaaaaaatactggccattcccaacctatggtgatttactgtttggcgtaaaataacgtatcagcaggaaaggacgcttgcgtattttcacctgatacgttagcgatagaatcgaagattctagagcataaaaaaatacagaaagaaggaatgtttattacttacagtgcagttccggttcgtaaagtcattgaaacagcgaagaaggatttgatgcccttcaggacgtagaataaaatcagaatggatagaaactaaatattgtaaaggcatttgagaaaagagaagtagtacaggtgatcacttacagcgaaggtggaacagtgagagccacgcagcagagcctgtatgaataacactttttaagctgcaatccgaacaggatttccttagtaggtgcgacgttacgtcaagcgttaatggcagaaccatgaaaaggtttggaaatgagacaaaagataggtggcaccgcgagcacagcacttgccctatagaatgctgaattactagatttacggaggtagatttatatgtgttctattatgggttattgcagccgcagtgctgcctttgatgtttttatgaaaggatttgagaagaccatatcaagaggtccggatgatacacgtgtggttgaaacaggtgatggccttcttggattccacagattatcaatcatgggattaactccatccggtatgcagccatttaagtatgggaacagttatgtggtctgtaatggagaaatttatggatttgagaagctgaaagaagaactgtcagtaaaatatacatttgaaagtgaatcggactgcgagatacttttgccgttatatcaggaatacggtacagacatgtttgacatgattgatgcggagtttgcctgcatcatctacgatggggaagcaagagaatttatcgcggcaagagatccgattggaatccgtccattgtattatggatatgataaagaaggtgctgttatatttgccagtgaagcgaaaaatctggtaggacttgcggagaagatcatgccgtttccaccgggacattattataagggcggtcagtttatctgctactgtgacattgctaaagtagatacggtttgtcatgatgatctggagacagtctgcaagagtattcatgataagcttgtggctggcgtggaaaaacgtcttgtagctgatgcaaaggtaggcttcctgctttccggcggactggattcttctttggtgtgcgcgattgcagcaaagaaaagtaaggaacggattaagacatttgcgattggtatgagtgaagatgccattgacttaaaatatgcaaaacaggtggcagattatattggaagtgatcatacagaggtttatatgacaccggatgaagtgctttcttcgctggaaacagtcattcagttgttgggaacctatgatattaccacaatccgtgcatccatgggtatgtatctggtgtgtaaggcaatccatgaacagaccgatatccgtgtccttttgaccggtgagatttctgatgaattgtttggttataaatatacggactttgcaccggatgcgagagcctttcaagaggaatcacagaaacgaatccatgaactttatatgtatgatgttctccgtgcggaccgttgtatctccgtaaactcgctggaagcaagagttccgtttggtgatctggattttgtaaaatatgtgatggcagtagacccggaattaaagctgaatacttatggaaaaggaaaatatctgctccgtcatgcgtttgaacagggtggttatctgccggatgagattctttggagagaaaaagctgcattttcagatgctgttggacattccatggttgattatttaaaggaatatgcacaaaagcaatatacagatgcagaatttgaaagaagatgtaaaagctatacccatgccagaccatttacaaaagaatccttattatatagagaaatttttgaaaagtattatccgggtcaggctgagatggttgcagatttctggatgccgaacaaagagtgggaaggatgcgacgtaaatgatccttctgcaagggtactatctaactatggtgataccggaaaataaaatgaagtaatggaaagatcgaggcactcaatcttgattgaaaagacacaaaaaattcacataatatgttagcgctcacgcttgacgagtgctaacaaaggtgctataacataattagaaacaggagaaagaaagaaccacgagttcatgattcttcctaaacatccccagtttcaaaatataatttgaaaaaggagcgatgattatgttaacacctagtatttttggagaaaatttatttgacgagttctttgatgatttctttgattttccggtatttgatgatcgggcaatgaagaaagcacagaaaaaactgtatggtcgtcatgctgcaaatatgatgaaaacagatgtgaaagaacaggatgatcattatgaagtggatatcgatcttccgggatttaagaaagaggaactttcactagaactgaagaatggatatttgatgatcaatgcagcgaaaggtctcgacaaagaggaaaaagaagaaaagacgggaaggtttgtccgtcgtgaacgttacgtaggcagtatgagcagatcgttctatgtgggcgaggatatcagacaggaagatattcatgcgaagtacgaaagtggagtattaagactgtctattccaaaacaggaagagaaaaaagcacagatagaagataaaaagtatattgctattgaaggataaatgcctttcataaaatgatagtaatgtgaatttggcccggagtcattatggcttcgggctatttatatggaacgattaacagagatatggaacaagaattttgaaatacctattgacatggtaggtaaataatgaatataatacagaaaacaaaaacctacttgaacagtaggcaataaggagcttgttatgggattttattttgaaaagcttgtacgagaaaactttcgttttggtcgaatgtgacaatccgcagtaagctaattgaaatcattgaaatttataaacgaaaggaactatattatgtcaaaatacagatttgaaacacttcagcttcatgtaggacaggaggctccggatcctgttacggatgcacgtgcagtgcctatttatgcaaccacttcttatgtttttcacgattgtgcccatgcggcagcacgttttggacttacagatgccggaaatatttatggacgcttaacgaactctacgcaggatgttctggaaaagcgtgttgctgccttagaaggtggtgttgctgctttggcacttgcttcaggagcagctgcaattacatataccttgcaggctctgggacaaaatggtggacactttgttgcacagaaaacgatttatggcggcagttacaacctgttggcacatacacttccggggttcggaatcacagcttcctttgtcaatatacatgatcttgatgaagtggaagctgctattgaggaaaatacaagagcgatttacatagaaacgcttggcaatccgaacagtgatattccggatattgacgcattggctgcgcttgcccatagacatggcttacctcttgtggtagataatacttttggtacaccgtattttattcgtccaattgaacatggggctgatattgtggtacattctgctacaaaatttcttggaggtcatggaactactcttggtggggtcattatagattcaggcaaatttgattggactgcttcaggtaagtatccagccatcgctgaaccgaatccaagttatcatggcgtttcttttgtaaaagctgcagggccagcagccttcgttacttatatccgtgcaattctgcttcgtgatacaggagcaaccatttctccttttgcagcgttttttttattgcagggaatcgaaacactgtcgctgcgtctggagcgtcatgcagaaaatacgaagaaggtggtaaaatttttaaacgctcatccacaggttgaaagagtgaaccatccatctcttccttcccatcctgattatccgctttatcagaagtatttcccgaatggtggagcatctatttttacatttgatattaaagggggagtggaagaggcttataggtttatagatcatctgcagattttttcattacttgcaaatgtagctgatgtgaaaagtcttgtgattcatcctgcgactacaacacacagtcagctttcgccggaggaactggctgagcaggaaattaagccaaatacaatccggctttctattggaacagaacatatagaagatattatcaatgatttacagcatgggtttgatgcggtagaataagtaaaggagagtgtttgagatgtcaagagtatatacttcggcagagtagctgattggaaagacaccacttttggaactcactcatattgaaaaagaatatgagttgcaggcaaaaattttagccaagctggaatactttaatccagctggctcggtaaaagatcgtgtggcaaaagcaatactggatgacgctgagagtacaggcggattaaaacctgatacagtaattattgagccaacttccggcaatacaggtattggtctcgcttctgttgcagctgccagagggtatcgcatgattcttgtaatgcctgataccatgtccgtagagcgacgtcagcttatgaaagcatacggagcggaacttgtgcttagtgaaggggcgaaaggcatgaagggagccattgcgaaagcagaagagctggccaatgaaataccgaacagttttgttcccggacaatttgtgaatcctgcaaatcccaaagcccatagggagagtacaggccctgaaatatatgaggatacagatggtaatgtggatatctttgtagtaggcgtaggtaccggaggtacagtgacaggtgttggtgaatatctgaaagcacaaaatccggatattaagattgtggctgttgagccggcatcttcagcagtgctttctacaggcattgccggttcacataaaatacagggcattggagcaggatttgttccggatatattaaatacttccatttatgatgaggttattacggtagagaatgaagatgcttttgcaaccggaaaactcatagggcatagagaaggggtgcttgtaggcatttcttccggagcagccttatgggcggcaatccagcttgccaaaagagccgaaaataaaggaaaaacaattgttgtattgatgccggatacaggagatagatatttatcaacacctctatttgcagaataaggaaagaaggaacaaaggaatgatgatctcaacaaggggaagatatgctttgcgtgtattgcttgatcttgcagaaaatcagaatgaaggttatatagcaatgaagacagttgcccatcgacaggagctgtctttaaaatatatcgagagaattatgtctgtactttctaagaaccattatgtggaaggggtacaggggaaaggcggcggataccgtctggcaagggaaccaaaagattatagggttggagatatattaagacttgcagaaggggaactggttccggttgcatgtctggaatgtaatgcaaaaacctgtaaacgtgcagatacatgtaaaacattgccgatgtggaaagaatttcatcatatggtaaatcattattttgataatattactcttttggatctaatgaaatagatcgatgaaagtagggatttttagataaaatggattgacaagataaaatttaagaggtaaaatagtgtgcgtaaaggcaaaggcgtctttaagtttaaaatgaacttaaaggcgcttttgccctttttgcgttcaaaaatgcaggaaatgactttattggaggaagaatgaaatgcaaaagtgtgaacaattatatgaaggaaaagcaaaaaaggttttcttaacggatgatccggatgtcctgattgtttcttataaagatgatgcaactgcctttaatggcttgaagaagggaacaatcgttgggaaaggtgcgatcaataaccgtatgaccaatctgttgtttcagaaaattgaagcagaaggtgtgccgactcattttattcaggaattaaatgacagagaaaccgcagtgcgcagggtggagattgttccgttggaagtaattgtgcgaaacgtggctgccggcagtttttctaaaagattgggtgtggaagagggaacggtacttgctgagccgacgattgaattttcttataagaatgatgaactgggagatccgctgatcaattcccattttgcaaaagcattacagcttgcgactgcaagtgagatcaaaacgataaaggattatgcatttaaaattaacgaaattctgaaagtggaatatttaaaagcaggccttcgtctgattgatttcaagatagagtttggccgttttcatggcaagatcattcttgcagatgagatttctccggatacttgccgcttatgggatgtggaaagtggagaaaaaatggataaagatcgtttccgcagggatttaggaggcgtagaggatgcgtatattcaggtggcaaaacgattaggattagagatggagagtaaatagattttatgagaacagatatttatcaatcacctttatgtgaacgttatgcaagtaaagaaatgcagagtatattttccaatgatagaaaattttccacatggagaaaactctgggtggcacttgcagaaagtgaaaaggaactgggacttcctatctctgatgagcagattgaggaaatgaaagctcagattgacaacattgattatgaaaaagcaagacaatacgaaaatgagcttcgtcatgacgtgatggcacatgtccataccttcggggatgcctgtcctgaagcggcgggaatcatacatttaggagcaacttcctgttatgtgggggataatacggatattatcctcatgcaaagtgcgctcttgcagattagaaatcttttgttaaatgccatagaagcccttagcgaatttgccatggaatataaggcattaccaactcttgcatatactcattttcaggcagctcagccaacaacggtaggaaaaagagcctgtctttggatgaatgatctgctgtttgatatcgaacagcttgattttcaactgaataacttaaaactccttggctgtaaaggaaccaccgggacaggtgccagctttttggaactgttcgatggggaagaaacaaaggtggaacagctggagcagaaaatcgcagaaaaaatcggtttttcaaagtgtcagagtgtcagtggacagacctatacacgaaaagctgattttgcggttttacaggtattgtccggaattgcacagagtgcatcaaaattctccagtgatatccgtttactcagccacttaaaagaggtggatgaaccatttgaggaaaaacagatcggttcttctgccatggcatataaaagaaatccaatgagaagcgaacgtattgcatcactggctcgtttcgtgatttgtgatttacaaaatactgctattacagcagcttcacagtggtttgaacgcacattggatgattccgcaaataagcgcctggctgtaccggaagcatttctggccacagatgccattttaaatctgtatatcaatgtaatcagggggctgaaggtctatccggcagttattaagaagcatctggatgcagaacttccatttatggcgacggaaaatatcctgatgtattgtgtaaaaaccaaagatggggacagacaggaacttcatgaagcaatccgtaaacattctattatggcagcggaacaggtaaaactctatggaaatgaaaatgatttaatagaacgtatcaaaaatgacgatagctttggactttctgccatagaactggaagttttgcttgacccggtgaagttcaccggaatggcagaatatcagtgcgagaagtttgtaacagaaaccgtgaaaccattactggaaaaaaataagcagcgtgtgaacgtggaagcgcaagtgaatgtctgaaaggaaggaatgcatatgcttacatcaattgttggaacaaactggggcgatgaaggaaaaggccgtatggtagatcttctcagcgaaaactatgatattgttgttcgttatcagggcggaaataatgcgggtcataccgtgatcaatgaaaaaggaaaatttgtcatgaatctgatgccgtccggaatctgccgtgaagatacggtcaatattctgggaccgggcattgtgattgacctggaacatttgtacggggaagtgcagaaactggcagaaaaaggtgtggaagtaacgccggaacatttaaagatcagtgacagggcaaccatctgtatgccatatcataagctgatggattgtctggaggaagaccgattgttagataagaaatttggatctaccagaagaggtatatctccggtatatgcagacaaatatatgaaaaaagcactgcgtatgggtgatttgctccatctggaagcattaaaggaacgccttggtggtcttgtggaatggaagaacctgactgtggaaaatggatatggtcatgcaccagtgctggcagatgaaatgtttcagtggttaaaagaatacggagagttctttgttccttttatctgtgatacgacggaataccttggagacgctattgaagagagaaaatccattctgtttgaagcacagcttggggcactcagggatatagactttggcatttatccatatacctctgcatccacaacccttgcttcttatgcgccaatcggagctggcgtaccttttgcaaagctggatgaaagcatcggtattatgaaagcatactcaagctgcgtgggagaaggaccttttacctgtgaactgtttggagaggaagcggagcagcttcgtgcggcagggggcgaatatggtgcagcaaccggaagaccgagaagagtcggaggctttgatgtggttgcttccagatatgggacaaagatgcagggctgcagctatgtggcacttacaaagctggatgtgctttcttatatggaaaaaatcccggtatgtacagcgtatgagattgatggaaacagagtagacacatttccatccggtatcgaagaacttaaatgtgcaaaaccgatctatgaatatcttccgggatttcagtgtgatatcagcggatgcagaacagtagatgatcttccaaaagcggcattggagtatatccgttatattgaaaaggaaatcgagtgcccgattaagtatgtgtctgtcggcgccgaacgtgatgcctatatcacaatgttttaggagaaaaggaaagatgcagaatcagaaagtactaattttgaattttggcggtcagtatgaccagttgattgccaggagggtgagggaatgcaacgtctattgtgaggttaagccttataccatgaccctttctgagattcgggcatttgaccccataggcattatcttcactggaggaccggacagtgtatataaagaaaattcttatcatccggcagaaggtatttttgaccttggaataccgattcttggtatctgctattgatgtcagctccttgcccatcatcttggaggaatggttacggcagcagaaaatgaaaacgccagagagtatggaaaaacacttactttctatgataattcttgtctgctgtttgacggactggatgaggagagtatttcatggatgagccatggcgactacatgaggaaagtacccgacggatttaggctggttgcctgtagcgggaaatgcccgaatgtagccatttgtgatgaaaacagaaaatattatggtgtacagttccatccggaagtaaatcatacagaaaatggaactaccatgatccgaaactttttatataaagtctgtggtgcagtgggtgactggacgatggaaagctatatgtatcgctgtatcgaagaaatcagaagcaaagtagggaatgataaggtgcttttggctctatcgggaggcgtggattcctctgtgtgtgcagccctgtttgcggaagcagtgagttcacagctcacctgtgtttttgtggatcacggtcttcgtatttgaggaagaaggcaaaaaaattggcaggacggactatctggcacagggaactatttatccggatgtgattgaatccggcaaagaaaatgcagaaaccataaagagccatcacaatgtgggcggcctgccggattttgttgattttaaagagattattgaaccattgcgtttgctgttcaaggatgaagtaagagaactgggaagacagcttgggcttccggaatatatggttatgcgccagccgtttccaggtcccggacttgcaatccgtgttctctacgatattacaagcaaaccgccggcaatggtggagtttgagtaaggaagtgaaagattatgactaaatatatatttgtgactggaggtgtggtatccggtctgggaaaagggattaccgccgcttctcttggacgtcttttaaaagcaaggggcttaaaagtggcagcacagaagttagacccatatattaacgtagaccccggaaccatgagcccgtatcagcatggcgaagtatatgtaaccgaagatggagcagaaacggatctggacctggggcattatgagagatttattgatgaagatctgaatcaatactccaatctgacgactggaaaggtttattggaatgtattaaacaaggaacgaagaggagaatacttaggttccacggttcaggtgattccccatatcacaaatgagattaaggaatttgtgtaccgtgtaggaaaaaagacggatgcagatgtagtgatcacggagattggaggaaccattggggatattgaatcccaaccatttctggaagcagtacgtcagatttcattggaggttggcggggagaacagtttatttatccatgtaacgttagtcccttatttgagtggctctgaagaacataagtcaaaaccaacgcagcactctgtcaaggagcttcgaggaatgggtatcaatccaaatattatagtgctgcgttctgataaaccattggaagaatccatctttcagaaaatttctcttttttgcaatgtgaaaccggattgcgtgattgggaacaggacgttacagaacctctacgaagcaccgctgatgttggaaaagtccggattctcagatgttgtttgcagagaacttcacattgatgcgccgaaaccggagctggaagattgggaacagatggtggaacgcatccgaaaccgttcccgggaagtccacatcggtctggttggaaagtatgtaaagctccatgatgcatacctgtctgtggcagaagcaatgaaccatgcagggtatgaactgaatacgtttgtgaaaatccactggattgattcagaaaatatcaggtcggacaatgtaaaggaaatattggaaggtctggatgggatcatcgttccgggcggatttggaaatcgtggtatcgaaggaatgatcctgtcagcaaactatgcccgtgaaaatcagattccttactttggtatctgtctaggtatgcagattgccgtcatcgaatttgcaaggaatgttctgggacttaaatgtgctcattcgggtgaatttgatgaacagtgtgcccataaggtcattgattttatgccgggacagagtgaggaaattgataaaggcggtacgctccgtttgggaagctatccatgcagcattaaagccggaacgaaaatggaacaatgctatggtaacaaactgatccatgagcgccatcgccatcgctatgagtttaataataaatatcgtgaggaactgatgagagcaggacttgtgatcagcggtacttctccggatgacagactggtggaaaccgtagaacttaaggagcatccgttttttgtaggcgtacagtttcatccggaatttaagagccgcccaaatcagtctcatccactgtttaaaggattcgtttcggcagctttattaaaaagaaacgctgattaagtcgaaacgaaaagaggagtagaaaaaatgtgtggaattattggatttgcaggaaagacagaagctgttccgatattgcttgatggtctggaacgactggaatacagaggatatgattcagcaggagttgcggtcgtatcagcggatgggagattacaggtaaaaaagagcaaaggacgtctgtctgttctgcgggaattgctggactctcaaaatcctttgtcggggaatatcggcattggtcacaccaaatgggcaacccatggggaaccaaatgatacaaatgcacatccccatgttgggcaggaaagaaagattgcggttgtccataatggcatcatagaaaattatctggagatcaaaaactctcttatccgtaaaggagtcgttttttcttctgatacggatacagaggtaatcgtccagttactggaatattattataggaagaaatccaatctgatggatgcagtgtatgcggttttaaatcgtatcaaaggtgcttatgctatgggcattctctgttctgattttccgggacagatggttgcagcaagaaaagacgcccctctgctgattggttacggtcaggagggaaattacattgcctctgatgttactgcacttcttgcacatacaaggacagttacttatatggaagatgatgaagtggcagtcattacggcagatgatgttcagatctttgacagagacagatttttgctggaaaaagaaaaacatttgattgagtgggatgtttccgcagcagaaaaatatgcggcaattatcagggagcttcaagatttacctgaaaagataagtgttgttatgaatgatctggatctttatcagaaagcggcatccagatatttcaaccataacagtgttttctatattggtcgtaatctggactatgcactgggtttggagggctctctaaagctgaaagagatttcttatattcattcagaatcctatgcggcaggagaactgaaacatggaacgatttctctgatagaaccgggaacactggtggttgctatggtaacctatgagccgctggtggaaaaatccttgtccaatattgttgaagtaaaatccagaggagcagaagtaatcgcaatgacgacagatcagacagcagagctgattagcagtcaggcatccgaaatgtttgtgataccaaagacccattcccttttgcagccggttctcggagtgattcctttgcagctttttgcctattatgttgcactgaatcgcggctgtgatattataagccaaggaatctggcaaaatcggtcacagtagaataatacgcaggaggaaaagagtatggcgattcatgaagaatgtggtgtattcggtgtgatgagtacacaaaaagaaaatgtggcagggattacctattatggattgtatgccttgcagcacagaggacaggagagctgcgggatcgttgtgaatgatgatggtgtgttttcttcctataaagatctgggccttgtaagcgaagtgttttcgaaagacacattatctcatttgccggaagggactatggcagtgggccatgtaagatatggaacaaccggcgggacaacacgaaataactgccagcccattgaagtcaaccaccagaaaggaaagatggcactggcacataacggaaatttgagtaatgcattggagctgcgtgataagctggagttatcaggagccatttttcataccaccagcgatacagaaaccattgcttatgtgattacaagagaaaggctgatgacaccgagcatagaagaagcggtaagcaacaccatgaatttactggaaggggcttattcattagttttgatgtcagctacaaagatgattgctgcaagagacccatatggattcagaccactttgttatggacagatgccggatggagcctatgtagtggcatcagaaagctgcgcattatcagcggtaggcgcagaatttgtcagagatctgcttccgggtgagattctggtgtttagtcaaaatggagtggaatcaaggaaagaacactgcggtaagcagaaaaagaaaacctgtatctttgagtatatctattttgcaagaccggattctgttatagatagtgtatctgtccatgaatcacgaatgagagcaggcgagctgctctcagaaagttatccggtggacgcagatattgtgatcggagttccggacagcggactggatgcagcgcttggatatgcaaataaatccggcattccttatgggataggactgatcaaaaataaatatattggaagaacattcatttctccgggacaaaatgaacgtttggataaagtcaggattaagctttctcctgtgaaaaatgtaatcgatggaaaacgagtcgttcttattgatgattctatcgtaagaggtacaaccagtaaacgtattgtaaagcttttgcgtgacgcaggagcgaaagagatacatatgagaatctcggctcccccattcttacatgcctgctattatggcacggacattgactcagaagaaaatctgattgcatgccatcatagcatggaagagatcgcagagatgatcggagtggattctttgggatatttggaggtggagaagctgagtaagctgattgacagcgaggattattgtgctgcctgctttaacggagaatatccaaccaaaattccggcagatctccgtaaagaccgttttgaaaggaaactgtctgaacgggtttagatagaggggtgacatatattatgaaaaaatttgacagaaaactgattctcccagatggcagtgagtattatggatatggttttggttcctttgatgaaagaatcacggaaatcgtatttaatacctctccggttgggtatcaggaaatcatctctgatccgtcctatacctaccagactgttgtgatggcatatccgctgattggtaactatgggattgcagaagaagattttgaaacagaaacaccgacgattggaggattggttgtaagggattataacgatcagccatccaacttccgcagtaaatatacattatccgaaatcatggagaaataccggattccgggaatttatggaattgataccagaaagctgatacgttctattcgtgatttgggaagcagaaaagtattgattacagatgctgatacttctctgcaggagggactttgcaaattgagttcctatgatataccaaaagatgcagtagcttttgtgagcagaaaagagattcagcaatataggattccggatgagaaatatcatgtggccgccattgattgtggaatgaagcagaatattgtgaggagttttaacagacgaggctgcaatgtgacggtatttccatggaatacctctatggaagaaatagaaaaaatgaagccggacggaatctttttatctaatggtccgggagacccgatggatgtgcagccggtcatagaactggtgagaggcttatggggaaaatatccgatctttggaatctgccttggtcatcagatcatttcccttgcatatggggcaaggacctataagttaaaatttggacacaggggaggaaatcatccggtaaaaaatcttctgacaggaaagatagagattacctcccagaaccattcctatgcagtggacagggaaagtcttgcgaatacccgattgaaagtaacgcacctgaatctgctggatcagacagtagaaggtgttgcctgtgaggaggacaaggtgtttagtgtgcagtatcacccggaaagcgcaccgggcccgcaggacagcggttatctgtttgaacagtttatagaaatgatggagggaacaaaagatggcgaaaagaactgatttgaagaaaatacttgtcattggttccggtccgattgtgattggtcaggcggcagaatttgactatgcagggacccaggcatgtcttgcactgaaagaagaagggtatgaggttgtcttatgcaactccaatccggcaacgattatgacagataccaccattgcagataaggtgtatatggaaccgttgacattggaatatgttgcaaagattgtccgtcatgagcgtccagatgccatcgtaccgggaattggtggtcagaccggacttaatctggcaatgcagcttgagaaaaaaggtattttaaaagagtgccgtgtggagcttttgggaaccagcagtgagagtattgaaagggcagaggacagagaactctttaaagagctttgtgaaagcttaggagagccggtgcttccgtctgtcattgccaatacggtggaggaagccataaaggctgctgagaatatcggatatccggtggtgcttcgtccggcatttactcttggcggaaccggcggcggctttgcagatgatgagcaggagtttctgggattgattaaaaatgcccttgctttgtcaccggttcatcaggtgctgatagaaaaaagtatcaagggctttaaagaaattgaatatgaagtgatccgtgatgccaatgacacagcaatcacggtctgcaatatggaaaatctggacccggtaggaatccacacaggagattccattgtggtatgtccgtcacagacactgacgaataaagaatatcagatgctccgtgacagtgccttgaaaatcatccgtgccttgaaggtggagggaggctgtaatgtacagtttgcacttgatccggattcttttcagtattatctgattgaggtaaatccgcgcgtatcccgttcctctgcattggcatcaaaggcaagcggatatccgattgcaagggtatcggcgaaaatcagtgtgggaatgactctggatgagattatgctggtaaatacgcctgcatcctttgaaccggcactggattatgtggtaacaaaaatgccgcgttttccatttgataaatttaccgatgcaaatcagaagctgggtacacagatgaaagcaaccggggaagtcatgagtgttggcagaacctttgaggagagtctgttaaaagcaatccgttctctggaaacaggcgtaaatcatctgtatatggaaaagtttgaaaaagaagataaaaaggctttgatggaatatatcaaaatcggcacagatgaccgtatctttgccattgcccggttgttccgaatgggcgaatcggtttccgatatcagggagcagacacgcattgaccgtttcttccttgataagatgaaaaaaatcattgatatggagaaagaattgaagcagtgtaccggtaacagagagcttttgtatcaggcaaagaaggcaggcttctcagatagagcagttgggtggctgtggaatatgatggaaacggacatttatgaaatgcgtaagacacatggcattttcccagtctataaaatgattgatacctgtgcatcggaatttgaaagctatgttccttatttttattctacttatgaggatgaaaatgaatcgatcgtggaagacaggaagaaaatcattgtattgggctccggtcctattcgtatcggtcagggcgtggagtttgattattccacggtacatgcagtgaaaaccattaaagaagccggatatgaggcgatcatcatcaataataatccggaaactgtgtctacggattataccacatccgacaagctgtattttgagcctctttgcgtagaagatgttatgaatgtgatcgaaatggagaagccggatggaattattgcatcacttggcggtcaaactgcaatcaacctggcaaatccactgcaggaacgtggggtgaagctgattggcacggactgtgctgcaatcgaaaaagcagaaaacagagatgcttttgaaaagctgttgtcagagctttctatcccacagccgaaaggacaggctgtaacgaatatagaagatggcgtaaaagcggcagaagagatcggttatccggtgctggtacgtccaagctttgtacttggcggaagagccatgcagatcgtggcaaaggaagaacacctgcggcactatctgaaaactgcggtagagattgatgaagataaaccggtattggtagacaaatacatctgtgggaaagaagtcgaaattgatgccatttgtgacggtacggacgtatttgttccgggaatcatggagttggtagaaaggacaggggttcattccggcgattccatcagtgtatatccgacgtttagcatttcagataaggtaaaggctacgattttggactatgcgaaaaaactaggtattggcattggcattgtgggactgtttaatatccagtttatcgtggacagacaggagaatgtatctatcattgaggtaaatccgcgttcttcaagaacagttccatttttgtcaaaagcaaccggatatccattggctgatattgcaacgaaagtcattcttggaaagagcctgaaggagcaggggattactgtgagctatcccgaagaaaagaagaggtggtatgtgaaagtgcctgcattttcctttgcaaagttaagtggtatggatgcttacctgtcacccgaaatgaaatcaacgggagaagcaatcggatatgataagaagcttcacagggcaatgtataaagccatgattgcttccggtattcgtgtgcagaattatggaacagtcattgtgacgcttgcagatgaggataaagacgaagcccttccgcttatcagacgcttttatgatatgggctttaatatagaagcaacctctcttacgggagagcatttgaaacagcatggaatccgtacccgtatactggggaaaccatcggaaggaagcagtgagatactggatgcgatccgtgcaggatacgtcagctatgtcatcaatacccgtgcaattctttccggtgttcattatgaagatggtgttgcaatccgaagtgcggcaacacagaacaatattaccatgctgacatctctggacacggtaaaggtacttttagatgtgctggaggaagtgaccattggtatatctacgatagatgctgaatgaaaggattgcctggaaaaaatgcttcatgtaatacagcgatattcggttatgcttgttacaggaaatatggttgccatagacaaacggggaaacaggagtaagaaaacttttgattgattacaggcaaaagactcctgtaactatatgctaaatatctccagaatatttggagggaaggcatcttattatggatgtgccatggcattcaagagggaattgaaagaagttatcttaacgtttccaaagtatatggaatcccatgatacatggattgccatggcagcaaatttattgaaaagcagcgttcatttggaatataccgtcttagaacacaggctgcacggaaataatgtgacaaaatctcatagaaaacttggaaagagacttcattcaagaattctttttgcaagggcattgggcgaattgtccatcagaattattagatatcgaatcatacagggaggagaataacatgatcagaccaaatatgcattacagcgaactaaaagattcctatcttttttacaatattgctcagaaaaccaaggcttatgtagagcagcatccgggagtaaagcttttaagaatgggtattggagatgtttcactgccattatgcgatgccgtaatcaaggcattgcatgaggctgtggatgatcaggcttcaaaaagcagttttcatggatatatgcctgagtgtggtgcctcatttttgagggatacgattgcaaagtattatgaaaacagaggcgtttctttgtcctcagacgaggtgtttgtttcaagtggagcaagcgatgagcttggggatattttagacttgtttgaacgttccggttctgcattggtgattgagccggcttatcctgcgtatgtggatgcgaatgtgatggcaggaaggaagattgtccatctggcttccggggaagaaaataactttttgcctgagccgagcgaagaaataaaagcagacttactctatatatgctcaccaaacaatcctaccggagccgttttttcacgtaatcagcttcaggcatgggtagattttgccaatgagaatggttccgtgattctctttgatgcagcatatgaggcttttattgaggatgaaactcttccgcatagtatttttgaactggatggagcaaaaacatgtgcgattgaaatctgctcgctgtccaagactgccggttttacgggaaccagacttggatatacggtaataccaaaagcattgaaacggagtggaatgaacctgaatgaaatgtgggtacgcaatcgtacaacaaagacaaatggtgtgtcttacattattcagaaaggtggggcagcagtttttacggaggaaggacagaaacagattcacgaaaatatccgtatttataagaaaaatgcaaaggtgctgatgaaagcgcttgatcagcttggaatctggtattgcggaggaaagaatgctccatatatctggatgaagtgtccaaatggaatgggaagctgggagttttttgattatctgttacatgaaattcaggttgtgggaacaccgggagaagggtttggagcctgtggagaaggctatttccggttttcaacttttggctcaccggaagatacaaaagaagcggcagaaaggcttgtaaagctgctttcaaaatgagaaaagaggtgcaggagatgttcgatgcaggaaaggtaacaaaggactgtattgactggatcagagatttttttgaacagaacggacaggactgtaatgcagttgtaggaatttccggtggaaaagatagttctgttgtagccgctttatgtgtggaagcactgggaaaagagcgtgttatcggagtcttgatgccgtgtggggaacagggggatattgatatggcgtacaggcttgtgcaacatctgggtatcagatactttatagtaaatataaaggagtctgttgatgcagttacaaaaagtatcgggattttgccggaaatttctgtacagacaaagaccaatcttccagccagagtgcgtatgacaacattgtatgcagtatcacaaagcatgaatggcagggtggcaaatacctgtaatttgtctgaggactgggtaggatatgcaacccgctatggagatggtgctggtgatttcagcccactgtgtaatttgactgttacagaggttaagaagatcggaatggagttgggactgcctgctgaattggttgaaaagactcctagtgatggactttgcgggaaaacagatgaggaaaatctggggtttacctatgcagagctggatgagtatataagacatggcgttacaaagaatatggaaacaaaggcacggatagattcgctgcatcataggaatcagtttaaaattgagccgatgccaggatttgtatataaataactgaatattaacagcgttctgaagaaaacgggtggtgactgatagttgccatccgttttctgggtgcgccttgcggcgcacgtcgctaatggatgaaagttgtgtgttctgcaagctgttatcagcttgccagtgaaagtctggtcaaggtaatcgccagtgagccttgtagcgaacctccaatgcttttggatgaccgactgtgttgaagcgaggtatgcctgtgagaaacaggtgcaaaatagcagtccgtaacataaagtgaatcctgtagcatcgttacgttagccctgtaagggacaagagggagtcgagtcactgactttctgacgaagaccatggaagatgtggggatactggagtacagcattgaggaacccttcggtgtagagggagcggaatgttatgaaagttgataacggaacagaagagatctcataccatcatataaccacaagtatgtaactgaggatataagcacgcatgggtcattaagttatgcagacagtggttacagtcaggagtcattgaaaatgggaaatattatccaacggaaaaaggctcaccgcaaggaggagtcattagtccgttgttagcaaatatctatcttcatgtattggactcctactgggaaaatcataaagaactgggcgtcatagtcagatatgcagatgatgcagtgattgtgtgcagaacaagaaaagatgcagaattagcgtttgagcatctgaaaagaataatgactaagttgaaactgacattgaatccgcaaaaaacaaaggttatagatatgaataaggagagctttgactttcttggattccgttaccataagtttggtaaaaccaaaagcggacgaaagttgccttatatgatgcctagtaaaaaggcgatgaaaaaggtgaaggacgcaatcagagtaattacttgcagaaagtcagcctatgagggtctggagcaaaaggtggagaaattaaatccacttataagaggatggagaaattactttcagcatggaaactcaacaaaacgatttaaacagcttgatgaatacgtgtggatgaagctatggagacgggtgtattacaggcgaaagcagaagaaatacagagagcatgtgttgtatggatttcgaaagtggtatgcaaccagtggaattactactttgataaagtccattgccacattgaaaaagacttggatgccactctatgaacagtacacagatggtaagttatccagagaagatttccttatggaaaagaagaaatatgatgaagaaactgcaagattggaacaacggttgcaggagcttcagagcagacaggaaatacagcaggaaaatcatcaacagatagaaaagaatatcagtcagttgaaatgttacgctgatcagatggaacttacggaagaaataaaagagaagctgattgacaaagtgaaagtatattccgataatagaatagaaatctgttggaagtttgacagcggttttttagatacgcagactatgcataagtgcggttgatatacggacttgtgcagaaataaaaaaattataattttttttagtccttacttgacagaagaacaaacaatatctaaatgggagaacggagtttcccaaacaaaaggatattaaggaataacctgtgtttacctgcttgcagaatactgttgtataagagaatgacacttgaaatatagtgtctttttctatatataatgaattttaattagataactgaaaaagaatgactgttcatttttagcgtgatataatttatgttagagagaatgataaatttgaaaggtgtaaaggagaccaactatgaaagataaaagcattttaatcagtgtgggaattattatttatattgttatgtctggaattgatagatttgtttatcatatacctaatgttatttatattccagtagcaattctcggtattgctttaattttaattggctttttcaaggataaatctaaataacaaaatttgaagttgcgaggatgaacatttatgaaaggaaaaagtaaaagtggagtttcaataataggtggtgcagatggtccaacaagtatttttatagctggtagagcacagaaaagacctctaaaagtaaggatacgaagtattctctacagatttaaacgtaagagagcagagaagaaagtagttgcaggcgaacatactcttgatgagttagtacaatatgcaaagaatagctacaatctaattgaaactaattcatctgagagaaaatatattgaacaacaaaacaatctaaaggagagtttgattttacagcataaaccagaaattttaggtgaaatgaaggatattccaaagccgaatatttacaacgaaaaatctattagagaatatctttataaaatagaggcacgaagagaaatgattgccgaaatgccagataatgtaattcctatgaacttccatctatatgaaataagaataggtgatgattctcttgaaatgaatatagattatatttggaatatattggcgatatcgtattctggaaataagaaagtaatgaaacaatttcaaaaaatttcaaaagatttgtatatcttttatggtgttagtgaaaatgatattaagaaaaaaacagaaagatatttatcgttggtaacagcattaagttcataaatcataatttgaaaaccacatttttataagtggttattaaccctcacagggttttaataaaatcctccaaaagccttgaaaataaagagtttatcgcaaaatgctcaccttaacttattatacgatttcacttatgcttattcttcccttggaagctgataagggcaaacacaagggaaagaaaatctgataacaagatataacagaatgtggcaatcggagaactgtgacgtatgtgcgaatatattatactggaggatttattatatggacaagtacatttttgatgagagtaatggtttatggtatgaattgcagggagattattatatcccttgtctgatactttccgaaaaagaaacacagcctatcggtttgtggggacaacgccacaagcagtatctaaaggagcataagcagttcctctataccacaatgctgattgagggtacactaaactcctaccttgcagatattgacagacaggcacaggagcgtttgctcctgctgacaaagcaaattgcagagcaggaaaatgtgaccgagcaactgaaagcagataatgctatgctgtgggtacagaaaatgaatgaaattcagtccagagttagagaaatcatttacagcgagattatctacgcataacagaatgagtgattggggcggtaagccagcttttggcttactgcccttgtctgctcataagcaaaataaagaaataccgtcaatggcagtgcttgcactgttcatcgagaccattgacggtattgcgtattttgctatcgctgtccgtggcttttttcaattttaaacgttgcttaaaacaacttattgtgttaaaatatatgctgatacaaataagagtttaggaggaaccgaaactatgacagcctcaatgcgtttaagataagctggcaataaaaaaagcagaatctatccccgatgataggcttttttgttgttagaaattcaagcaaaataatatgcaggagataatataaatggaaaaatacaacaattggaaacttaagttttatacaatatgggcagggcaggcagtatcattaatcactagtgccatcctgcaaatggcgatcattttttaccttacagagaaaacaggatctgcgatggtcttgtctatggcttcactagtaggttttttaccctatgcggtctttggaccagctattggtgtattagtggatcgtcatgataggaagaagataatgattggtgctgatttaattatcgcagcagctggggcagtgcttgctattgttgcattgtatatggagctacctatctggatggttatggtagtattgtttatccgtagcattggaacagcttttcacaccccggctctcaatgcggttacgccacttttagtaccagaagaacagcttacgaaatgtgcaggctatagtcagtctttgcagtctataagctatattgttagtccggcggttgcagcactcttatactccgtttgggaactaaatgctattattgccatcgatgtattgggtgctgtgattgcatctattacggtagcaattgtacgtattcctaagctgggtgatcaagtgcaaagtttgaaaccaaatttcatacgagaaatgaaagaaggaatggctgtactacggcaaaataaaggattattcgctttattactcgttggaacattatatatgtttgtttatatgcccataaatgcattatatcctttaatcactatggaatattttaatggtacaccgatgcatatttctattacggagattgcttatgcctctggtatgttgatagggggtctattattagggttatttgggaattaccaaaagcgaatcttattaataacggcatccatttttatgatggggataagcttaaccatttcaggattacttccccaaagtggatttttcatatttgtagtctgctgtgcaataatggggctttcggttccgttttacagcggtgtgcaaacagctctttttcaggagaaaattaagcctgaatatttaggacgtgtattttctttaactggaagtatcatgtctcttgctatgccaattgggttaattctttctggattctttgctgatagaatcggtgtaaatcattggtttttactatcaggtattttaattatttgcattgcaatagtttgcccaatgataactgagattagaaaattagatttaaaacaaaattcataggagggccatttttatgtatttaattttcatgtaatttttcctgctaaaatcgcagggttttccctgcgtacaagcaaatgaaaacatgcgattatagacaggaggaaaatgttatggaattgatattaaaagcaaaagacattcgtgtggaatttaaaggacgcacttgtttagatatagatgaattagtttcgttaacaaattccacccaaaatagaaaagcgatgcgtagaaaactttcaggtttctgttgagtttggattgcataagaaaacaccctgcaagacgaaaaaatcttgcagggtgttttcttatgctctgatatatatgtaagaccgcaaggcaggttgccctgcggtgttgatttcctatgtcgtgattatctgtccctgccttgggatttctttctctgcttcgactgagaactctgtttactctcttcctgaagctgtctgagcctgttacgcacactttgtctttcgggcggtctgtgctgtttctcggcaggtttctgtccgttcttaactgtctgctcccattctgcaaggtcttggttatactgtgtgataatagcctctgctttgcggtaagttttcataaatgcctgtacatcaggataaccgtcatcttttagaatatcggggagtttatccagtttttctttaagctcggattcggtctgctgtatctgtttttccagagccttgcgttccttgcccttgaagatacccgttgtttcagcaagctgctgtcgcagattcgggagtgtgatctcctgtatcttcttgattgctttcgcctgcttctgtacctttagcataagggtctgcattgtgcggaactcgtccatatccatatcaaggactggcttgggtggcatatccttttcacggatgatggcttgcagaaattcctttgccttgcctacgatacttctgaataggtttggaagccaaccattttcacggatggactgaccggctttatcgtggatttcggtctgcttgatttccagtatctttgtttcttcaatgcccgatacaagagccaaatctgctgttctgttccattcctgccttgccgtgttgtccgcttcgatttcggcagctttggggttgttcttgcctatcttttttgtggggagatacacgctgttcttatcaaacactttcagtcgttgctcgggatctgaaatgtgggaattgataagttccgtgtaaacttcttttgcttctgctatgaacgcttcacttttgaaacgctcatctttggttttgaataaatggctttcgtaaacatccccctttttgataacggtacagccttttcggatttgaccgttttcgtctgtgatttctttcttggttcgtaccctttttcctgtttcgtcataaaatacgcttctggtggcaatcttgatgtcaggttctggaagcagtttcctttcgctgaatatgagatgaatgtggtaattggtcttgcgtttgttgtggtgcagagccgatacacattccactccgtactgctgtcggaacttatccgtaaattcttcaagcacctgctgagggtcaaaggtggtgtaaatctccggcagggcaatgattagctcccttgcttcgatacactttcctgttgttccgcttctctggaactcctgctgactttccctggcgagatttttccaaaaggtattgtcggcggtacgataggtggcataaaggttttcctgtttggcgtggctcgtgatatatgagattcttcccttgacattgggcagcttcgacatctgaatgaacgaatgtcttgccaaccttttgctcctttcttcgctgagaataccgtactcattacgcaaccgacttgtcgggtgcggctgtcacagccatcggtgattggtgggacagcaatggaaattgcggtgcaatttcctctgtatcatagctgaggtggtggtgtccgaagctgtgatacaggctccccgcaggggcgaaatacccagagtacaaatcgcagatttgtgcgaggggtgtatttcgctctcaaacgccgagggctttggagaacggtcattccacttttcgtacatcacttggattgagtaagttcctgccctgattgaccgtcataaaacgctccagcgtatccctgcggataatggtctttcgtccgactttcaaaacaggcagcttgccccagtccaccagttttcgcattgtgttcctaccgatacccgtacattccgctgcttcttcgatagttaaacccattttaattgctgtcattgtacatctctcctttcaaaatactcattttgcaactttgcaattatcattatacttattttgctatttcttgtcaactcattttacaacccattaaagatattttttaatttttatcagaaaaagagttgcaaaataggttttggtgtggtatacttggtttcgataggaggtgtaaaccttgaaaaaagaaattacattcaccgcaaaacaggtcggtgaacgagtgaaagaacgtcgaacagaattgaatcttacgatgccggagcttggcaagcgtatcggagtgaacaagtctacgatacagagatacgaagcagacggcgtagacccaaaaagaacaatgattatcaatggactggcagaagcactgcttaccactcctgaatggctcacaggtctttcagaggataaggaatatgacagcagaacgctctgtgaaaaagatttggaagaacatatcaagaagtacattgatactgtgtctacggttgtgaatggcgaaccgcaccaacagctccttaccacatttctcggaaagatgattgatttatattccgttctctgctaccacttctccgacgctatggcagaggttgaccgtgtggcagaagatgaaggactgaaacagtctctccgcagatatgcgattgaatcaggagcgattacagagcgagtttaccataaagagatggaagcaccgattgaggatatgaaacgattcttagacggaattttacatatctacgatgaaggacgcaccgctgtaaagatgggtgaccttttcgggatagtagcggaagccgaagcaaggcttgccgaaaaagaataattccgtggctctttgacaatgaaaaaagccgatgaaacaatcggcggatgtgacactatttactttacgcacaccatacgtcacagttccggttgccacggatagaaaggagactatttatcaatggcaaaaggatctgtaagaaaaaagggcaagaaatggtactaccgcttctatgtagaagatgaaagcggaaagatggtacagcgtgagtttgcaggcacagaaagcaaatctgaaacagagagtctgctccgcaaggcaatggaggactacgaagcgaagaagttcgtggcaaagcctgagaacaccacagtaggtatgctgcttgatatgtgggtggaggaagaactgaaacccggcaatttgagcaacggtacagtgatggcgtatatgggaacagtgaacaggataaagaaatatcctatcggcgacagaaagctgaaaacggtcactgcggaacatttacaggcatttatggactttctcactttcggaggacaaaaccctgacgggacaacagcaaaggcacttagcaaagggtatctgagactgttctcagcggtattgcagggagcgttccgatttgcggtattcccaaagaaactgatttcctttaatcctatgcagtatgtggtatggaggggaaagaaagaggaatatgaactgtttgcagacgaggacggagaagttgataatgctcctaccattgaccatcagcagtttttaatgttggaggactttctgaaaaagaaagacaatcctgcattgctcccgatgcagatagcctattacacagggcttcgtatcggagaagcgtgtgcattgacttggcaggacatcaaccttgacggacagtacctcacagtacgacgcagtatgcgatacaacgggcaaaggcacaagacagagataggtgctaccaaacgcaagaaagtccgcaccgtggacttctgcgacactctggcggacattctcagaaaggcaaagacggaacagcacaagagccgcttcaagtatggcgaactctaccgcctcaattactataaagaggtcaaggagaaagaccgtacttactatgaagtctacagcctgccgagaacggatgaagtgccagacggatacaaggaaatatcctttgtctgccttagacctgacggagcatacgagtcaccgagtacggttggtgttatgacaaggtcggcaaaaaagaaactggaaggatttgaagatttccattttcatatgctgagacacacatttaccagcaatctgctctccaatggtgcagcaccgaaagatgtgcaggaactgctcgggcactctgacgtaagtaccacaatgaacatctacgctcactctaaaagggaagcgaaacgaacttccgcaagactgcttgataaggtggtcggggaagcctaaacaaaaagtttcccttgtttcggctcataagggcaaaaacaagggaaaatacataaggaacgaacattaaaatgccgattttccttgaaaacacaagggtttcggaggattaaatagataaattccaatttagaaagctgataaaaataggaaatcaggatttgaaggagaaattaagatggaagaaaaagaattattgcaggcattggctgtagcagagaggttgaaagatacgactagacattgttatacatcgaaaggacgtcaggaaagtgttgctgaacatagttggatgatgactctcatggcattttttatgaaaaatgaatttccagatgccgatataaataaaattatccaaatgtgtattatacatgatctaggggaatgttttacgggtgatattcctacatttagaaaaacaaaagaacatgaagatacagaagaacatctgctgaatgcctggatagatacattgccggaagcaactaaaaaggaaatgaaagacttgtataaggaaatggcagaaaagcagacaatcgaagccaaaatctataaagcaattgatagcctggaggcgttgatccaacataatttttctgatatttcgacatggtctgaaaatgagtttgaattaaatttaacctatgcggatgacagagtgggcttttcccaatgcttgtctgatttgagggaacaaattagacaagatactatgaagaagatttccaagtgctgatattttaaattagaatctgatgaggtaaaaataaatgaagaaaaaataaaaatcatagttgtgttggtaattggatttgtagtcgcaataatattgatgagtgtagcaatttattttggagacattaatgtatatagcacaagtgtagatacattgcctgttaaaatatttggaatacctatttatgaactgacaaaatcaggaacaaagtacattggcaaaacaatagaaatttatatgggagtagtgtgtggtatttgtatgtttcttagcgctattgctgaagaacttatcagtagaatcagtagagtaaaacataaataaattccagtaatatggagagatgaatttaaatttggagagattaaagtgtcaatatttacaaagatagcagaaaaatatgattggaagataatcggtgagccagtgtgcttgagcggtggctttatgcacaagatgtataagattagcacacagcaagggattttcgctctgaagttgctaaatccgtttgttatgcaaagagaaaccgctatggataattttgcaaaagctgaacggatagaatttttattggagcagcaaggtgttccggttcttcctgcattgtctttgtgtggaagaaaaatgcaggagatagatggtgaatatttctatctatttgactattttcctgggaaagccttaaaaagcaacgagataacagcagatcactgcaaagaaatgggaaaggtacttgctgaaatccatagtgtagacaaaaagtatgaaaatgaagctttttatgaaatgtttattgattggaatttctatcttgcagaaatgaaacacactgatacgaagttatacgcaatgctgaaagacgctttgccggtgattcaagacagtcaaaatacaggtaatcaggcacgaaagaaactctcccctatcgtgtcaatctgtcataacgatatggactgcaaaaatgttctctggaatgggaatgattatcgtattattgatttagagtgtttatcttataacaatccgtttatggaattgtttgaattggcattgtgttggtcgggatatgaagattgcaaaattgattttcaattatttcaagcttttttgcaaggatataaaaatgccgatggggaaatgcccatagattgggaaacattatatgactgcaataacggcagattggagtggttagaatataatattaagcgtgttttaggtattgactgcgggaatgatgaaaaagaaattggaatagaacaggttaaagaaacaattcagcacatcatttactatgcaaagatgaagaaccaaatacttgagcattgtattatataaattgcagtttatatggcaagcgataaatttggaagttgtaaaggaggcaaactatgggcgaaaattatttggatatggctactgttatagtgatattttttgttctcggcatcttattatcaagactgggaggtgttggaggaattgttgtaagaattaaaagaatggtttgcaagctaattggacataaagactgagagaagcgatataaactggaagttgcggaggtgtgcaaatgaaaagggaattaggaattgccagatgtgggcttgcgtgttgcttatgcacagaaaatgctgattgtaatggatgtggcttaaatggttgcccagataatgatgtttgcgagaataaaaaatgttcaattgaaaaagagttgacacattgttataagtgtgaagaaaattgcaagaaaggattattgggcaaaatcaaaccatacacatttactttatttgctaaaaaatatggagaagaaaagcttttggactgtttagagagaaatgagaaaaatggagttgtgtatcatcgagatggcataaatggagattatgatgattttgatgatgtagagcagctaatgaattttatcttaacaggagtgagataactcccagtttgagcctttaaagagataacatttaacctgctgatatttgatgtgtcagtaggttatttttatacatgtaaatggagtatcggatagaaggaaaaggctaccttttgatgccaagaaacagcttgtattgaagttgtagacttgatatactgacaatatatagatatgtaaatttgaaattgtcaaaacaaaaaaatctggtgatacgaggagggtgtttgagatgtttggattgatgaacgctatatttccaatcatgtttattactgtggttggtatcattattttctctttggtgcagagaattatcacatggaataagaataatcagtcacctagattaacagtgccagttgtcgttgttgcaaagcgagaaaacgttacgcagcatcaacatgcaaatgcaggtgattcgagcggtgcacacggattccatactacaacaagcacttcatattatgtgacatttcaggtggaaagtggagacagaatagagctttgcgtttctggagcagaatatggaatgcttgtagaaggtgatactggcagactgacttttcaaggaacgagatatttgtcgtttgaacggtaaatttgaagttggaggtttagcagtggcatcaagtaaagaatatttagaatttgttttggggcagttatcgaatctggaagaaattacttatcgatctatgatgggagaatttattatttactatcatggcaagattgtaggtggtatctatgatgataaattacttgtaaaaccggtgaaatcagcaattagttatatgccaacagtttcgtatgaattgccttatgatggagcgaaagagatgctgttggtcgaagaagttgacagtaaggagtttttaacaggtctgtttcacgttatgtatgatgaattaccagcaccgaagccgaaaaagaaaagataaattactttcggctatagaaaacagaagtgaaatgagcagacagataaagcagaagttggaggacagtgttatgagaaaagtaaatttatttatcgcaatgagtctggatggggataatattgtgggaggtcttggggtcattgtaaatgattttcataacaaaaaagatcttacaccgaatgtatgtgcgtatataccgaaaaagaatatcgagggcaaggaattgcaggatatttgctgcatacagttgtagcagatatgaagcggaaagggatcacaccactctatctgatcacggatcttacagatttttatgaaaaatatggatgggaatttttctgtatggtgcagggcgaagaagatcctgaacagatcagaatgtatattcacagatgaagaggtagggaatcgaaaggtttcctgcttcttaaatttgtgcccccctttttggtcacggcatgaatttgtctgtttcctacatagaaaaataatgacgtcagaaaatgaaactgttataataaagatagactttatttttgttaaacggtgagagaaatttcgtatatagaagaggaaacaaagtgagacagtgtacaaatgagaaggagggggattatgggtacgggattgcagatgatcgtgggaatgcttgcagcgctagtgatcgtatgtctgttgatagtagttcacaggaagcagaggctggtgtggagtgctgtttttgttctgcttggaattacgacagtgtttgccgggatatttattttcacagggagtgaacggaaagaggatgagaaaacagtatcggcagagcaattggaggatgtctatattggacttgcttatggatttatggaagaagaggcatatgaggaggcagaaatttttctggggaattatctctcttcgggggtatatgatgatgcctatctgcttgcgcgggcaaggctttatggattgcaggaaaactatgacggtgcggaaggcttgtaccggatgctgattgacagaaagtcaaaggcagctggaagaaatgagctgaaagaagagctgaaagtgatagagagggcgaagaaggaagcggatgaggatgcgagagaggatgcaaaatcgcttttgaaggaagcggcatcttcctgtacagaaaagcagacagggacagaggatgtagtttcctattatcttgcagtacagaaagaacaggatggagaagaggaagaaaagaaagcagacatcccggatggagagatatggaaactccgggagatgaagcttgccaaaatgcaagggcagatccaagaggaaaattatggggagattgcgcaggagatgaatgcctgggaggacagcagtcagctgcttgtattttctgaattgtatcgtcagggactgatcagcacatccatgctccgtaaaaatgaagaattgcaggcaaagacagagcaggccaagcaggcacttttctgggtaaataagcagaaaaggggatacaggtataccggggaagacaagaaactgatcgatcagacgctgaagcagttagagaaagcatctgatgacagtgaagatgcatatgatttctggatgcgtgacagacttttagaggcggcggggaaggaagaagagaaagaaccgtcaaagctttatatgcaggcatcaaggcttgcctacgagagtggagatcagagaagtgcgaattcctgcctggataaagcgctcgatactgtggcaaggagtgaggatgctgcttatcgtggtccggcaggagaactgaatcggattttatcggagaaagaagataaagaacagctgaaagaaattgatacctatgcgaaacttaccgttgatcatatcgttccgattgtagatcattctcaggatacagacggacagaaggaagaaacttttcaggaaaataaagaagagaggcaggaagatttcacgcagtatgtcacagatactgtgaatcagaaggcggcatctgtaagtatttcgggaattgataccaaggagtttgaaactgttcgggcagtagtttctttggaggaggggattgcagacaccgaagagaagtttcgggaaaatgtggaaatccttgattgcggggtagaaattcctgattataaagtgaagaagctggaatatgacacagtaaatattgcgctttgctgcgataattccggcagcatggaaggagagaagatcgagaatctgaagaaggcagtttctacatttgtagggaagcttgcggatgaggtcaatatcgggattgttccatttggaagcggtgtgttagaaggggtctgtgagccgggaagcagcagggagaaattggagcagtctgtggagtctttccgttctgatagtggaaccaatatatacagtggagtcgaatatacactttcgatgctggcaaaagaaaaagatgccttgaatatcgcggtgatcatgtcggatggacaggatagtatcccttcagaggagcaacttcagaagattacttccgtctgtgagaacggaaatattttgttgtattcgatggggcttggtgcggatgtagagtcggaagtgctaagtacttattccgatgcaggaaacggagcatatgtctttgtatcggattccaattcgctctattctttctatcagtatatttatcagatcagtaagaaccgttatgagattgaatatcaggcagtcgacacgatgacacagagccggacactccgagtggaacataaaggacacaggaagatttatgatgagagatcgtattatctgtatgagaatgatctgacagaggaagatctgggaccagagagtgatctgcagattcaggatatgatattttatgggttagatacgaagcttctttatgagtctcctgctccccagaaggtgagactgatgggaaaggatttaaagaaagaaaataagatttcggtatctcttcacggggcaatggaatatgagttggaatgcaaatatgaaagtgacacaagttgggaaataacgattccggcgagagcagcatgtggagtgtatgacgtttatgtgacggcaaatggagagcgaagagtattcccgtctgggcttgtgatcacttcaggagatctgaatacggttcgttatggaaattatatatttacttctaccgggaaagaggtctgcggagacacgacaaaactgaccggatatatccgaatgaatggatggcttggattccaggacagtgtgcaactggaaggagatttgaagaaagatccagaagtacttatgcgctgtcggagatcttatgtacagtatgatagaaatactgcaaaaggatatgcaaagcatcttgcagagtatggaatgtatgcttcccttccgggattttcggaaataacactgtacaatgatccgctgacagatgcttcctcggataagtatccagtgaaaccggcggtctcaaatggagcattcattctgcaggatttttcaaggattgattatgcgaagatcgcattgtatccaaatcaggcagtcgttgagtttgacagtgtacagaccgagcttccatttcaggatgctgttttaaagacagcagaatctgaaagtccgtttgcatttaagtttgatcatgcagaacagattatcatgaatgataagcagatcggctgtgagatttcactgagtcttggggaggaagatgagaaaaattatcatgcgctctttggaaatatgccaatctactgtaaccttggtacagcggaactaaatctgaatacattaagtggggatgtctctgcgaaagtacttgtcaatgttgcaatgttatgtgatggcatgggactggaactgcagtggaaagaatggaaactggatggcgtggaactgtatgcagactacccggtcaatacgacaatttcgggagtcccggtaaccttttcagatttttcacttggtgtggaggaaatcagttcgattgacaaactggatatgagagaacttctgaaactgaaatacaaaggaggatttgaggtggcggtggcaaaggtttctgaatttaagccagggttggaagaatgggtcggcgatgtaagccttgcctctcttgatcaggtatctttggaattccagttgagcagaaagtatatttcggtggcagcaactgcaaaacttctggaagcagttcagatcggagactgtgcactggagcttggagaaggaatttcttatacaaatatgttgcttggtatgcagggagaaaccgtcaatggcttccggggagaagtcggtgttggaatcaagatggagaaagacaattgtatgttcaatgtccggggagctgcggagcttgcacttacaaataaagtgtgtggaattggggcttccggggagttggaggcaaatgtatcctggtggattgtggctttgcagacgcaggcaaaaggacagggatttatcggagtctatgagcagcataacggagtgtgggcattcgggctgcatggacagacgagtgatccgggagacaaaggcattcatcttgtgtgggcatcggaaaatccagaactttcgagcaagacactgagttaagaaaaggatatgaaagagggagcatgtatgggaaaaaggaagaaaatagaaaaacaacttgcagtgtataagaaaatgcaaaaaggttttctgcattttctgttgattgttcttgtctgctttgggatggtacagatgggaaaactccaagaagtacaggcagcaagatcggatctgatgactctggaaggagagaaagatgttgttgtaatcctcacttatgataaggaggcgccggaagtttctatcacggatccttccgggaaggtgtatgcaaaagagagtgattttgcggcggtacaaaaagggcaaggggcagtttattattatctgcgaaatgcaccgggaggtacctggtacatagattacgataaaaagtcaaatagcaaactggaagtccatgtcatgccgtggtatcaggaagtggagatacgatcttttgtgatggaagcgcccaaagaagagcggattcgaattcaggcggaggtgattgcagaggaaaatatcggatatacatattatatttatgcagtgacgatgaacggggagatggttgacgggaagaaagagctgaaaactggtagcggtatagcaaaccagaaactggaaacagaggtagatatttcttcgctgcccgatggagaaaattatcggttgcagatagatgcagtggtcacagatactgatgagacggaactcaccacatcggcagttactggagaaggcttttctgtgaaaggacgtacaaaagcaggtgacggggcaaaacttcgcaccgtactggactatacagacagtgcactggagatcgactggagcaatgccgaggaatcctgtgaccagtgggtgatcggtgtgtttcaggggaaagatacaaaggaacctgtttatgcagaacagcttgatagggatagcaaagcgacgactgtcagcattgatctagatggagagaatctgaaagtagaattgtccgctatgagcaatggaaaaatcgtggcccaatatgataggatgatctcattaaatccaggggtgacagttacgattgaaacaccggagcagaccggatcgacaacggcagaagtttcgtatgatgttggcgataagaaggtgcaggcagaaatagcagtaggagaaaagtcacagaaggttcagtgggaaaagaacggaacagctgcatttgaaattgcagatatggaaacgcaggaaatctgtgttgtctatggatgggaaaccggaagtttttaccgggtatccagacggatcagcacagatgttgtaccgccaatgctggagctttacggagtggacgagaatatccgagtgaaagaaaaggtgcttccgctttctgggaaaacagactcgaatgctactttgaaaataaatggcaaagagcaaaaaattgggaaagatgggacatttcagatttccctcaaactaaaaaaaggagaaaatgcgatcacactgaccgcagcagatccacttgggaatcagacatccagaacgattcttgtacaatatcagaaggaaggtacaaaaggggaaaaagcaccgcttccgggagacttctggattttgggaggaacattttttactacgtttctgtgtgcgttgctcatggggatatttggaatcgtctctggcagaaaagggggcaatataagaaaaatcttcgcagtggcaaaaggcttctgcgtctgtggaatattgggagggatggccggcagcggctggtatctgtaccgttactggaaactgacagagaagatttcagggaaaaatctgaccggggtattaaaggcggctccggtatctgatttgacaaaggtattggaacaaaggcaggagtgtctcagacttctatggattccggcaatggcagcggcagtctttttgcttctgttactccttcttatcattggaggaagggcagcccgaaaggcacaggaaaatcatagagaaaaagcagaacgaaagaaagcacagagagaagaacagaagcagaaaacgaaagaagaaaaagaacgatattgtccgtattgcggggcgaaaaattccgctgcgagtaaatattgcggaaaatgcggaaaattgatggaataaagaatacaaggaggaaaaagaaatgcagcaaaaaattcattttgaatgtgattacacggagggagcgcatccgaaaattttgaaacgtttgatggagacgaatatggaacagacagtcggatatggagaagatccttattgtcagaaagcggcagaactgatccgcggactttgcaaaaaagaggaagcagcagtccattttcttgtagggggaacgcaggcaaatctgacagtgatttcagcgctccttcgcccgcatcaggcggcagtgtgcgtggaaaccggacacattaatgtccatgagacaggagcaatcgaggcggttgggcataaggtgatatccgtgccgggaaaaaacggaaaactgacggcagaagatgtggagcgggtatatcgattacactgggaggatgccactcacgaacatatgccacagccaaaacttgtctatatttctaatccgacagagattggaacaatttatacaaaagcggaactggaagcactgcgggcggtatgtgatcggtgcgggctgtatctgtttttggatggggcaagactgggatatggtttggcagcggaggataataatctggatttggaaagcattgcggcaaactgtgatgtgttttatatcggagggacgaaaatgggagcactcttcggagaggctgttgtcatctgtaatccaaaactgcaggaagacttccgctatctgatcaaacaaaaaggcggtatgctggcgaaagggcggctgcttggaatccagtttttggagcttcttcaagatggtttgtattttgatttgggcgaacatgcggtgaaacttgcacaaaaacttagagaaggtttactcaacgcaggttacaaaatgcaggacagtacgacaaatcagcagtttgtgatcgtttcggatgaggaattgaaaaaaatagaagagaaatattgtgtatcttatattgaacggattggagaagatcaaaatgtgatccgaatctgtacaagctgggcaacaacggaagaaaacgtagaacagtttctccgtgatgcagagcagataaagaaagcgctttaaactaactccataggaagcatgttcctttccatgcttcgttaaaaaaagaatctcccatagaaatcacgggtgtttgccagaccgtgtctggcaaacatcggatgtatgggagattcttctaattacggaatgtcagtgaagtgtctgtcatggaatcgatgattgccagcgattctaagtgaacaccctgagagcggatcagatcaccgccattttgcatgcctttctcaatgacaactcctgcaccttcgatcgtagcgccggaaccttttacaagatcgatcagccctaacattgcacagccatttgcaaggaaatcgtcgatgatcaaaacgtggtcgtcctcatttaaaaacttcttggagaggatgacatcgtaagtacgtttgtgtgtgaaggattctacttttgtgtggtagacttccccgtcgatattgatgctctgtgttttctttgcaaagacaacaggaacaccaaaatattgtgcgacgatgcaggcaatcccgatcccggaagcctcgatcgtgagaatcttcgtgattttatcgcttggaaatcttcttcggaattcctttccaatctcattgatcagatcgatatccatctgatgatttaaaaaactgtctacttttaatacatttcccggtttgacaacaccgtcttttaagattctttcttttaaaagctgcatggtatagtttcccttctcttcggtgattttttgatttataaatcatcataccgcaagggacgaggattttcaacaaaaaataactggaaaacaaaagaaattacaaattgtgatatgaagtagaatgtgataaaataaatctgtatgtaataaaatgacgaaacagcaagggaaatgctggaaggaggatttttttgataacgataaacagttatgtaaagccggagagtctggaagaagcatacgagctgaatcagaagcgtgcgaacagaattcttggaggaatgatgtggatgcggctcgggagcggacgggtacagactgcgatcgatctgtccggcatgggattagatcagatagaagaatcagaagaggaatttaaaatcgggtgtatgtgcactctgagacagttggaactgcataaagggattaaccaatatacagatggggcagtaagagagtgtgtaagacatattgtaggcgtacagttccgtaatcaggcgacagtcgggggaagtatttttggaagatttggattttccgatgttctgacatgttttctggcgatggactgctatgtagaattgtataagggtggaattgtaccgctcagagagtttgtctgtcagaagagagatcgtgatattcttgtgaatgtgattattcgaaaagatgtaagaaagatccgctatgtttcttccagaagaacgaagacggatttcccggtaattgcctgtggtgtggcaaaagcaggagaggaatggcaggtatcggttggagccagaccgatgaaggcagttcttgtgacagagaaggctgatgggagaaatgcggctgaaattgcagaaaagctgacagagcaggttacatttggcagcaacatgcgcggaagcagtgaataccggaaagcacttgcaaaggttctgatccgcagacagatagaagcattgatggaggagtgttagagatgaaagtaaagtttatattgaatggaaaacaaactactgccgacatcaaggaagataccgttctacttgatctgcttcgggcaaagggctgttatagtgtaaaatgcggatgtgagacgacaaactgtggtctttgtacggtctggattgatggaacaccttctctttcctgctctgtacttgcggcaagagtgggaggaaaagaggtaacaacactggaaggccttcaggaagaagcggcagaattcggcgcatttctggcagcagagggggcagagcagtgtggatactgttcgcctggatttattatgaatgtacttgcgatggtgcgagagttagaagatccgacgttggaagaagtaaaggaatatctggcgggaaatctgtgcagatgtaccgggtatatgggacaactccgcgcgatcaagaaatatttagagatgaaaagggggacgaagtagtgagttttgtaaatacagcagtgccaaaggtagatgctccggcacttgtgaccggaaagccggtgtacacagatgatatcgcaccgaaagactgtctggtcgtaaagattctgcgaagtcctcatgcgcatgcgttgatcgaggaggttcagacggaaaatgcaaaaaaagttccgggggtggaatgtatccttacttacaaggatgttccggataagcgttttacaatggcagggcagacatacccggagccaagtccttatgacagattgatcttagatcagagagtacgctttgtcggagatgcggtggcaatcgtcgctgcggagacgaaggaagcggcagaacgtgcgatgaaactgatcaaggtcaaatatgaggtgttagagccggtacttgatttccatcaggcaaaagacaatgcggttttgatccacccggaggaaaactggaagagtctttgtccggttggtgcagataataagagaaatctctgtgcctgcggaaaagaggagcatggagatatcgatgcagttctcgatgcgtgtgactatgtagtggaaggaacttatcatacaaaagcaaaccagcaggcaatgatggagacattccgcacatatacttatatggatacttatggaagattaaacgttgtctcctcaacacagattacgttccatgtcagaagaattcttgccaatgcactggatattccaaaatcaaagatccgtgtcatcaagccacgtattggaggaggcttcggagcaaagcagacagttgtgacagaagtttatcctgcaatcgtgacgatgaagaccggaaagccggcaaaacttgtctacacgagagaggaatcccagattgcctctacgccgcgtcatgaaatggaagtgaaggttcgtgtcggagcagacaaagatggtatcatcaaaggaattgatgtctatacactttccaacacaggagcattcggtgagcatggaccgacaaccgtagggctgtcaggacataaatccattccactttatggaaagacagaagcattccggtttgcttacgatgttgtttacacaaatgtgatgtctgccggggcatatcgtggatatggtgccacacaaggattgtttgcagtagagtcggcagtcaatgaacttgcagagaagatggggatcgatccggttgccctccgcgagaaaaatatcgtgacagaaggtcaggtgatgcctgcgtactatggagaaacagcaaatagctgtgcgcttgatcgttgcctggaaaaagcaaaagaaatgatgcactgggatgaaaaattcccggcaagagatctcggcaatgggaaagtccgcggagtcggtgttgcgatggcgatgcagggatcctcaatctccaacgtggacaatgcttctgtggcaatcaaagtcaacgatgatgggttctacagcttgatgatcggcgcttccgatatgggaacaggatgtgacacaatccttgcacagatggcggcagactgcttggattgtgaaatggaaaatattatcgtatcgggagtagataccgatgtatccccgtatgattccggatcttatgcatccagtacgacatatcttaccggaatcgctgtgatgaagacgtgtgagactttaaaagaaaaaatcctagcaaaaggagctcagtatctggaatgcagccgggaagaagtcgattttgacggaaagaaggtattctgcttaaaggatggaagagaaatttctctgatggagattggaaaccgcattatgtgtaacaatgaggatgcactgtttgcttctgaatcctattcttctccagtatctccgccgccgtttatggtcggcatggcagaagtggatgtggatcaggagacgggagaaattgagctggtagattacgttgcagtggtagactgtggtaccgttgtcaatccgtctcttgcaagggtacagacagagggcggaatcgcgcagggaatcggaatggctctctatgaagatgttgtatacagtgagagtggaaagaatttcagcaattcttttatgcagtataagattccgagccgacaggatgtaggtacgatccgtgtagagtttgagagcagctatgagccaaccggtccgtttggtgcaaaatccatcggagaagttgtgatcaacaccccatctccggcaattgcacaggcagtatacaatgcatctggggttcgtgtgaaggaacttccaatcactgcggagaaagtatactggggtatgaaaaaatagtgaagattcatgtgattttactggcggctggaaacagccgccgctttggaagtaacaagctgttaagtctggttgaaggaaagccgatgtacagccatctgaccgagaagattgaaaagattgcagagagtcttccaatcggagaaaaagtgcttgtgacgcagtatgaggaaatttttgaaagcatgaaaaaggcacgatggacagttgttagaaatgatgcaccagaggaaggcgtttcctggtcaatccgactcggaatccaaagcattttaggcaaaatcagaaaaggcgatgcagtcagcttttttgtctgcgaccagccatttttgaagatggagacgatcgtttcttttttgagcggatatgcagcgagcggaaaaggaattggatgtctgacttataaagaacaatggggcaatcctgttgtattttcagaagtttacttaaaggagttgttatcactgtctggggatgttggagggaaaaaggtgatgaagcagcatttgcaggatacctttttcggagaagcggcatccaggcaggagttggaagatatggactatgcaccagaaagcaaaatgtgtgagcatacagatgtgtggaaaatcaagcagggagatcctgttttttttggcagcctttgcgatgcagtcgggattttgccgggcagagataagattatttctgttgtcggggcgggagggaagacgacaacctgttaccgactggcaaaggaattagcgttgcttggacaaaaggtcattgtcacaacgacaacacatatgtggaagtctacagaggactttgtggagtggaatgcagaaagcgagtatggctcttccactgatttttttagagattttgcagagcggctggagcggaagcggatcctgacagtaggtgtttcctgcgaaaatggaaaaatctgtggcatcccttccgaaaattatgaaacgctgtgcagtctggcagacgtactgatcgttgaggcagacggggcaaaagggaaggacattaaaatccctgccgcacatgagccggtgatctttccgggaacagatattgtgataggagtgtttggatatccggcagttggccactccatcgaggaggcaggttttcgtccggagatgcttgcagcatttctcgggaaaggaacagaagagaaaataaagtgggaagaccttctgtatatcgcgggaagtgatgaaggtttgaaaaagaatgtgaaaggaagctacacagtcctgattaaccgggttcctgtcgggagatttccggatggaggattggaagagatcatattttgcgaacagattgaaatagtatcagaaaaaaacgatagagcagattagaaatcagagactgggcagtcgttttccgtttaaatttgcaaaggggagaaagagtatgatagaaaaggagatatcttcagaaagacttcattatcgaaaaattacagagagcgatggggcagcgctgcatgccattttatcggatccattgatcgcggagcctgccggatatcaggcgctgggatccgaggaggagtttcgtgagttttttcaaaatttagtggaagatgagaatggaattgcaatccttctggaccagaaggtgattggttattttcgtatttttcctgaaaagatggaagaagagccttataaagggaaaaagtgtgcaggagtcggatttgttctggggaaggaatatcataggaaggggtatggcacagaactgctccggttttggacaaaaaagattaagcaggagtatgattattgctttgcagatgcatttacagataatccggcatccaacgcactgatcagaaaatgcgggtacacctatgtcgaagattatacgatgtattttgaaaaactggggagaacgatgacctgccatagctatgtgatatagactgggagccttcgcaggaagagagaatgaaggacaaaataaaatatttggaacataaaaatcaggaaagaaattgtgatgttgagatagataaaaatagatagaaaaatgaggaggagttcagatgaaaataagagttgctgtaattacagccagtacaactggatatgcagggaagcgggaagacatcagcggagcgaaaatctgtgagattgtggaagaagccggaatggaagtcacattcaaaaagattctgccggatgacagagagacacttgcaaaagtgatggcggtgatcgcggatagccagatggcagatctgatactgacaaccggtggaacgggattttccaaaacagactgtacaccagaggcgacaactgatatttgtgaacggcttgtcccggggattccggaagcaatgcgtgcggcaagtatgaagtatacgaaacgtgcaatgctttcccgcgcggcggcagggatccggaaggagacattgatcatcaatctgccgggaagtccgaaggcggtagaggaaagttttgcggagattttggaagaagtgattcacggcgtggagattttgactggacagactgcggagtgtgcgagaaaatgaaaaaattcatagaaggagagcgtccgcttcgtgtgttgatcaaaggggcgggagatctggcaagtgggatcgcagttcgcttatatcacagtggatttcaggtgatcatgactgagaccggtgagccgacgacaatccgcagatacgtggcgttttccagagccgtctatgagtctgaagccgaggtggaaggaattattgcaaagtgtgtatcgacaaaagaagcgctggaaagctgtctggaacagcagaaaatcccggtcatcacagatccgacttgtgtgcatatggactggtatcagccagatgtggaggtagatgcgatccttgcaaagagaaatcttggaacgaagatcgaggatgctcccattgttatcggagtcggtcctggatttacagccgggatagactgtcattttgtcgtggaaacaaagcggggacatgatcttggaagagtgatcacagaaggaacggcaattccgaatactggagtgccgggggtgattgcaggttatgcaaaggagcggttaatctgtgcttccggggaagggagatttgaaccgaaggcagagattggtgattgcgtagagaaaggacagcttgtggcaatgtgcggaaagaatccggtctacgcacagatgagtggaatgatccgtgggatgctcccggaaggaattgttgtatcaaaaggaatgaagtgcggggatattgatgcgcgcagggaatacgcttactgttttacgatttctgataaagcaagagcggtcggaggtggtgtccttgaggcaatcctccgcggaagaaagcagattgcagaaaatagaaacagggaatttgatgcatgatagccaaagaaaaagttgcgcgaaaagggagaacaggagaagcgaaatgagttattttccaatgtttatagatatagaaggaaagcatatcctcgtagtcggggcagggaagattgcactccggagggtgcagacattgttgcagtttcgtgcgcgcatcaaggtgattgcaaaagagatcccgaaagaacaaaaggaggcatttcatctgcttgtatctgaagggaaaattgtattagaagaaaaagcatttgaagagagtgatctgacggaagcactttttctggtgctggcggcgacaaatgtaaaaaagttaaatcatgagatttgtatgctgtgccgtaagcggaagattctggcgaatactgcaacggacagaactgattgtgatttctattttccggcagtggcagtccaggaggaacttgtcgtgggaattacgggagatggaagtgatcacaggaaggttgcagagacggcagcaaggataagaaaagttttggagatggaacatgaagagaaaaatcagagtaggcagcagagagagtaagctggcggtagtacagtcggagatgatcatacaggaactaaaaaagttacatccgcagttagagatagaattggtgacgatgaaaacgaccggagataagattcttgacagaagtctggatcagatcggaggaaaaggactttttgtaaaagaactggatcgcgcacttttggatggggaaattgatctggcggtgcactgtctgaaagatatgccgatggagacaccagaggaacttccgattcttgcatattccaggagagaggatccgcgggatgtacttgtgcctgcaaaaggaaaagaaaactggaatggtcagggtgtaatcgggtgttcgagtttccggagaaggatacagctacagaagttatacccggatgcagaagtcagagggatccggggcaatatccagacacgacttcagaaactggacagcggacagtatgatgtccttgtgcttgcggcagcaggattaaagcgactcggactcgaagagaggatcgagcggtatttttctccagaagagattcttccggcagcagggcaggggattcttgtcgtgcagggaagagaagagatgcgggaacttgtgaaagaacttcagcctgaggagatggaagtgatcgctgaaaatgagcgggcatttgtgcgaaggctggatggcgggtgcagttctccggtggcggcatatggaagaatagaacaggatgaattggttctgactggcctatattatgaagaagatacaggaaactatgtaattgcgacgaagcgggcagaggtccgggcgtcagcacatttaggatgggagcttgcggatgaattacgaacaaaacactaagaagcaggggaaagtatggcttgttggagcaggaccgtcggatcaagaacttctgactgtcaaagggaaacgtctgctttcggaagcagatgtcattgtctatgacagacttgcagggcagggtgtgcttacttatggggcagaacatgcagaatatattgatgtaggaaaacattccgggaatcaccgggtgagacaaagtgaaatcaaccagattctcgtaagagaagcgatggaagggaaaaaagttgtccgtttaaaaggtggcgatccgtttgtgttcgggcgcggcgcggaggaggcggaagaactaaagaaagcgggaattccgtttgaaattgttccgggagtgacatcggcagtatcggttcctgcataccagggaattccggtcacacaccgggatgctgcttcttcgctgcacattattacggcacataaaaaggaagggcatgagccggacgagattccatttcgggaactggcgggtgtgaaaggaacgctggtgtttctgatgggagtctctacactgccgtttttatgtgcaaatctaatccgggagggaatggatccgcagacacctgcggcaattttggagcggggaacgacagcaagacagcggaagatcacaggtaccttggaaactttagaagcacttgcaaaagagacaaagattcagactcctgcaattattgttgtgggagaggtatgcgcctgcagatcattggaatggtatgataaacgaccattggcgggaatgaagatcatggtgacaagaccgaaggagcagagcagccgtctggcaggaatgttgcgggaagaaggggcggaggtgttggaagcgcctgcaatccgcattgtgccggaggtggaaaacgaaagagtttcgcaggtgctttttcacatccagaaataccagtggatcgtgtttaccagtccaaccggtgtagaagtgttctggagcgcattgcggcagcagcgcgtggatgtgcgaagcctttctcaccttcggatcgcggtgattggaagcggaactgcgcgcgcgttggaagcacatggaatgtatgcggaactgatgccggaagtttatgatggagagcaccttggagcagcacttggggaggtactttctgatgaacatattttgattccgcgggcaaagattggaaatccggagttgatccatgagattaaaaagagaagcgaggcagtcatagaagaccttccgatttacgatacgcattatgaggcatatggatttatcaattaccaggaagaatttgagcaggggaagaccgattatgtgatgtttacaagtgcatcaacagtaagaggttttgcacaggcggcaaaagggcttgatttttccaaagtacaggcgctttgtatcgggaaacagacaaaggcagaagcggatcactatggcatgcagacatttatggcagagcagccgacactggaggcaatggtggcacttgcaaaagaaaggaagaagacatggtaaagattacttatatttctcatagctgctttgcggtggagctggagcacagcgtacttgtatttgattattatcagggggaacttccactttgggatccggagaaaacaatctatgtgtttgcaagccacagacattatgatcatttttccaaggaaatctttcggtggacagagcagtatccaaaaatccaatacattttatccgatgatatttctgaagcgtcatatgatgcaagtgagatttgcagatccgatttgacaagaatcgcaccaaatcagacagagacaattggaaattgtgtaatagaaacattccgttccacagatgaaggagtcgcatttcttgtgttgtgcgaaggaaaacttttttatcatgcaggggatctgaactggtggcattgggaagaagaatctacattgtacaacgaaacaatgaaggaaagataccagtcagagatcggaaaattgaaagaagcattgtcagggaagacgatcgatgcagcatttcttgtactggatccaaggcaggaagatgcatatgcccttggaatggagcattttctattggaaatcccagtgcagtttgcggttccgatgcatctgtgggaggagtatgcgctggcgaaacagtatgtggaaacttatggacagacacatgagaaaacaagattttggtgtgtcagcggcaaaggggaagaagtcattttgccggaagaagcgtagggaaagtaaaaactgtctgagaacagcatagaaaaagcaggatctgtttgtagagagaaggaaggagggggagtatgggacaggatattttattgcttttgatcatttttgtgctgatcatagtatttttgtatcagattgcggcaaatgccaagagaagagagcgatatttaaagaacacatggaaagaagcgtggggtactgcttcggagaaagaatatgaccgtacaaagtatgagtccatttctcattattttcagcagcagttgcgaaagggaaaaatcacagagccgtatgtagatgatattacatggaacgatctggatttggatgaggtctatcaggtgatggatcatacaacttcctcggtgggagcagagtatctgtattatcttctgcggactccggtgctttcggaagagaaattgaaggaacgagatcgcctgatggagtttttcaccaaaaatgaggaagagaggctccgcctgcaatatctgttctatgagatcggaggaatgccgaaatattctgtgagcgattatattgaccgtctggaggatgtcagacgtgaaaaaaacagcagacattatctggcaattgcagcgattgctgtcggagtcggtgcgctgctggcagctcccggggttgggatgatcttgcttatagcggcggcagtctggaatatcaaaagttattttgtgagaaaaagtgagattgaaccatatatcgccaccttttcttatctgatccgggttcttcgggcagcagaggcattggggaaggaaaaaatcccggagctacagttttatcttgacagactacataagattcgggaagaaatgaatgtatttctaaaacattcccatgtgcttgtggcagggagaggtgcgactggatcgatggtcgatgcagtacttgattatatccggatgttgtttcatattgatttgatcaaattcaattcgatgctggaaatggcagaaaaaaatagagggaaaattgaagaagtgatccaaattatcggatatttggacagtatgatcagcgcggcatctttccgtacatttcttccttattatgagaaaccgaattttacagaaggaaagaaggcggaaatctgtctggaaaatgtatatcatccactgctggcagatccggtggcaaattctgttatagcgcaccgagggattcttctgactggatccaatgcatctggaaaatctactttcttaaagaccgtggcaatcaatacggtgctggcgcagacgatttttacctgcccggcggcaaaatatgaagcgccgttttttcagatctattcttcgatggctctgcgtgacaacttgcaggggaatgaaagctactacattgtggaaatcaaatcattgaaaaggattttaaatcatgtaaaagaggatgttccgatgctgtgttttgtggatgaggtgctgcgtggaacgaacactgtcgagcgaatcgcggcttccgcacagatcttgaaaagtcttgcaaaagaaggtgtgatttgttttgcggcaacacatgatattgaattgacacatctgctggagaactgctatgacaattatcattttcaggagacgatcatggatgaggatatcctgtttgattattgtctgcaaaaagggagagcagtatcacgcaatgcgatcaaacttcttcggttgatcggatatgaagatcggattacagatgaggcagagaaaatggcagaagaatttttagcaacggggaactggaccagacaggaggaaagaatatgcatgtaaagatttatacagatggggcagccagaggaaatccggacggaccgggaggatacggaactgtgctcgagtatgtagatagaaaaggagaattacatacaagagaactgtccggtggttatagacggacaacgaacaaccggatggagctgatggcggtgatcaaaggattagaagcgctgaaccgtccgtgcagtgttgagttgtattcggattccaaatatgtggtggatgcgtttaatcaacactggatcgatggatggatcaagaaaggctggaagcgcgggaaaaatgagccggtcaaaaacgtggatttgtggaaacggcttctgacagccaaggaacaacatcaagttacttttatctgggtgaaaggacatgatggacatccacagaacgagagatgtgacacactggcgacgactgcggcagatgggacggatcttatgatagatgaaggggttttgtaaagagttagaaaaagagggatggcggacaatgcagatgcaaagtcggaccatccctcctttttctatggcgaggttttgaaatctgtttctgccggcatgaatctggattcgaattcggaaatgggcatcggtgctccaaataagtatccctgtgcagaaggacatcccatagaggtaaggagtgctgcctgttcttcattttcgatgccctcagcgatgacttctaccggaagttctctgcacatttgaattacatgcttgatgatcgtctgattagatgctctgaaacacagtgtctgaattagactgcggtcaagttttagaacgtcaaaatccatgtaggtgagaatggacaagtttgtatattttgtgccgaaatcatcgagggcaattgtgaatccggcctgccgcagctggtggctgagtgtcaggagaacatcgcgatctttctcttcgatcgtctcggtgatttcaatttggatcaaagaaggtgaaatttggtaagtgtgtaccagttcaagcagagaaggaaggatttcttcttccatcagtgtaattctagaaaaattgatggaaataggaaatgttttacgtccttcctgttgccagcgcctgagaagacggcatgcttgttctaaaacaaatagatcgatatagcggattaggtgctctttttctagtggtggaataaaaaaatcaggtgctatcaagccgcgttcctcgtggcgataccggatcaatgcttcagctccgataagttttcttgaggagagatctactttgggttgaagatagatgaggaatcgttcttcttttaagtcgcgcaatgtttgttgcaggatagtaggacgatgccgtttggcaaaataaggtgtttccatgtaatatttttgcttttcttccatcatcgaatcttctgcaagagatttgagtatggaaaaatctacttctttttgcatccagtggtagccaaaggaaattccgtcatgtctcagaacgatgggatctgcctgtaaccgtgaaatctgttgataaaaatatttgccggaagcattttcgcagataatacaaaattcatttccgctgagacggaagtgataggcatctgggaaatattctcgaaaaacacgagcagtgtctaaaagtacctgattgccaaaggaatatcccatcgtattattaatctgtttgaaaccattgatatccgcaagcacaagccctacggaggagagttcttcaaagtgccgttttttagtataagaagaaaaacttgcaagattgtaaaggccggttagtgcatcatgccagaagttatagtctagttttttctccgcatcgatactatgcagccgatttgtgagaagatggcataccagacgaagaaaatgtaactcattgccacaggtatgcgggttggataaaatcaggcaggcatttttagggtgttcagcggagaaagaaaaaccaagcatctgccggatttcgtaacgttccagaagcagcatttcctccggatagtttgggcggagcatttcaatatccgggatgtggatgatatcatttgtgtaaaataagtcctgaataaatgcgtatttttcaatttgagtcagctggaccaatgcactttgggaaatagagttttcgtaatgccagaggcatttgaaatgataagaatttcccgtatgggtaggatggatcagacagacatcatccgcctgataaaatttgccaagtgtttgcgcggtcccttgaaggatttcttttgttccggacagagattccagcagagaagcatattctgttaatgcgatagaaaatctttgctggattccgttcaattttagatcggtaatatcgatcgcaagttccattcgtactttacggtgattccatgtgataaatttatctttgagcaggtaatcacggttcaggagtcggtgatggtgttcccagatgaccggcttttgatccagaaggtgatttgtgcaaaatgggcatggtttatgttctccttgaagtacttcgtaacatttttttccgatgggatcattgccggataatcctaaaatgtcacggacttgcggggaaacatagaggagctcataggtgtatggatcactcagatatgtaatatcctccagattttcgatcaacgcatggaagatttcctcggaccatgcagaatcttccggttccataacaatttcacttctggtaataccattttgttcaggtagatgcatgactgaagtatagaaggtaaaacagttgcgcccacgagcttttgagtgataaagagcgatatccgctttttcatacagtacttcaaagtcaaatccatagttcgatgtgaggcagattcccatactatatgtaagaataccgcggaaaggtactacagtatatcgaagtttttctaacttttggatcagaaagtctttggaagggatatttttgatgaaagcaatgaattcatctccgccgattcgcccgatgatatcatctgaacggaaatgctgctgaattcgttttgccgtttcttttagcaccttgtctccgcaagcgtgtccatggagatcattgatctttttaaagtgatcaaggtcaatgatgataaatgcatggcaggcatcgggagaacttgcttctaattggctgcggatcaatgtctcagcagctcccttgttatatagcttggtcagaggatccagccgggaggcgttttcaagagtcagccgctctctttttgctgcatcaatgtcatgtaagtagagaagacagcggatatctccggaaacagggtctttcatcatatgggcagttgtttccacccagcaagtctttccgaaattcgtcaaatgacgatattctaatttgagttcctgaatcccgttggcataatttgcaagaagatttttacgcgaaaaagtttccagaaatttgggataatcttcccgatgaatatttttgattccttcgactcttagatattggtcataagagcggcagaggtgttccatcaattcttgggtattcatctcagagagggtgtcgatgataccttcggtcaggttgatttctgcgtaaaacagagtatctgcaagcagagcacgtcggtaagtttcttctttgagataagcatattccatttctttatgctgagtaatattttccacgacaccaatggcacggaccggtttgtgctgaccattgaaaacagttgtcattgtgatcgtattccagtaatattttccgtctgctgctaagatttctacggtgcagctgctgtgaggacttccttgctagatttctctgtacatggaaagaaaagcggcagcatgtttgcgtggaatgatcttagaacgcacaaaactttccggaacatcattcatgatttcgggcagtccatagaggtgcattgtttctttcgaatggaccacttgttttttttgaatatgatagtcaaagatcacactctgtgtctgtgtgacagcaatccgaaaacgctcctcgttgatagcaagttcctgttcagatagtcggcgctttgtgatatcgatgatgacgcaatttaaagtgggaactcctttccgggaatggctgaaggcaccgtttgtcagaagatagcgtatggaaccgtccttgtgaaaaattctttgttcaaattcaaaatgagattcttgacttcggtaagtacgctcgatgatttccataatagacgttgcatcctcaggaaggatcgtggcaattagcttgttgcccagttgtgtctgcatttctgcagaagtgtatccatatagctgatagaagctatcgtttccataaagaagtgtgaaatcctgatccatcaaaattttacagactccaccgggaatgttttgggtaagttcactcagctcttgctgcagttcaatggtatcagtgatatccagacagatacttgctacaaattcggaatttttatggaaaaacttctttccttgaccgatgacccagataaaagaaccatctttttttaacattctatatttaatttcgtacgtctggtcttcatttagagcagacaaaacagtgtctgttgtatactcccgatcatctggatggatgccgttgatcagtttatttttaataaacgtacaatattcctcgcggctctcaaagccaagaaggtgcagcagttgatcgctgatgaaatgaaaagggaatccttctccggtatagccgcagaggagtccaccggaaattgagcctttgagaaactcaaaaagatcctggtggagcaggctggagagggaagaaatctgatgatctgtcatgggtattgccctgcctttatttgttataatgattgcccggaaagaagagtttaaaatcttccttccggctcttgttctgttgtttgaaatgtctctggatatcataccatattgcaggcgtcggggcaatgactagaaaatgcagaagcaggggctggcaaaataaattatttgcggcaggcagtgataaatgaagcaaacagattacgcatgacaggagaagtacggtacatacattccgggtgccattggactccaagggcaaatggatgagcggaaagttcgattgcctcgatgatgccgtcagaagtccgggcagttgggacgagccctttgccgagtgagtcgactgcctgatgatggaaactgtttgtatagagggacgaacctgtgatggaggagagaatacttccttttgcgaccagtactttatggctgatttcacttctggaggcggaaagctgcatatgattgatgggcgcgtggagcgaggtgtcgatatcttggagaagcgttcctccacaggctacatttaaaacctgcattccacggcagatggcgagcaggggcttttttgtttttagaatggcgcgcagaaggcggagttgaaaaatatccagtgtgatgttggttgttcccaggccttttgccggttcttttccaaacagaagcggggtgatgtcgtttccgccgcagaagaggaacccgtcgcagagagaacaataagtttgaagtgcttcgtcagagcgcacaagtgggaggagaagcgggactccttttgcatattttatggattgaatgtaagcattagttacaaattggcggtcatccatcagaccgcagacaataattccgattactggtttcatagtacacatccttatgctttttattataggataggtatgtttcgtgccggatattcaaaagaacaggaaaaaaatatattttccactttttttcttgcattaatgctttaaagtgtgatagtatatggagagaaatcggaaagcctgtctgagtcgatctgctggtcggtgttttttgtggacgggtttggagagaaaaggagttgcttatggaaaagagagaaaaatttacgagcagaatgggatttgttatggcttgcatcggttcggctattggacttggaaatatatggatgtttccataccggcttggcgcttacggtggggcggcatttttgatcccatactttctgtttgtcttgattcttgggacgacaggactgattacagaatttgcgttcgggcgtgcctttggcggtggttcgatgactggaatctcagaagtgttccgtgaaagaacatggaagggtggaaagattgtaggaatgcttccggcaatcgggcttcttggcatttttatgttttacaatgtggttgtcgggtggattttaaaataccttgtaatgagtggaaccggaaagctggcaaaggtggataagaacacctattttacagagtttgcaggttcagctgcttccattccatgggatgcggttgcgatttttctgacggtactggtcatttgtgcaggtgtcgtaaaagggattgagcggatcagcaagatcattatgccggcattgtttttgatctttatcgtactgattttccagtcgctgtcacttccgggagcgatggaaggtgtgaagtttctgcttcagccaaaatgggagtaccttttgaaagcagatacatgggtgatggcgcttggacaggcatttttcacggtatccatcaatggatgcgggatggtagtgtatgggagctatttgaagaaagaatatgatattccacatctggcggtcagcacggcagttctggatacgctggcagcggtacttgcatcttttgtgatcatgccggcagtatttgcattcgggctggatgcaaaatcaggaccaccattattatttatgacgatgccggtcatttttgaaaaaatgccggggggaacaatccttgcagttatcttctttatcagtttgctctgtgcggcgatctcttcttctattaatatgctggaaggggttgtggaggcaatcctttcgcactcgaagctgacaaggaaaaaggcggtgattcttgtgggggttatcacatttgtgctctcagttcctttgaatttgagcatgacaacctttgatcagtttaccaatctgatcacagttgtaatttcaccgctgatggcacttcttgtgctgattgtcttttactatcttcatgatggagaaaaggcgcttgcggcgatcaatgaaggagcagggaaaccgcttggaaaaaggttccttgcgtttgcaaaatatgtgtttgtgatcgtgaccattcttgtagtgatcctcgggatcgtgtatgggggaattggttaaagaaatacagaatgttactcaagaagttttagaaaacaaaaagggcagctggaaagatcagctgtcctttttgtgtgtctgttttttacttttctgtttctgcaagtttcattgcgcgtacttttaatggaagaccgaataagttgataaatccttctgcgtcatggtggtcataaagttctccggtagtaaaacttgcgagagattcgctgtacagagaatacggagaggttgttccggctttgatgatatttcctttataaagcttcaattttacttctccggtcacatattgctgtgtggattcgataaatgcctgcacagcctcacggagcggtgtgaaccattttccttcgtatacaatctgagaaagtttgttccccatttctttttttacctcataggttgcacggtcaagcaccagttcttctaactgctggtgagcttccattaagatggttcctcctggagtttcatagacaccgcgggatttcattccaacaacacgattttctacaatgtcgatgataccgattccatgctttccgccgagggcgtttaactctgtgataatctcagatactttcatcgtttgtccgtttaagctgactggaacacctttttcgaaagtcattgtgatatattcgccttcatccggggcctgttccggggtaacgccgagtacaagcagatgttcatagtctggctcttgcgcaggatcctcgagctctaatccttcatggctgatgtgccataagtttcggtcacggctgtaactttggctggcatcaaatggaaggtcgatcccatgctgatggcagtatgcaatctcttcttcacgggaatttaatgtccaaagatcagtcattctccatggagcgatgatcttcagatccggtgcgagtgccttgatccctaactcaaaacgaatctgatcatttccttttccggttgctccgtggcagatagcagaagcatgttcttttcttgcaatttctactagtttttttgcgattcccggacgtgccatcgcagtgccgagcagatatttgttttcgtagattgcatttgcctgtacacatggcacgatatagtcatcacagaactcatcaacgatgttttcaatatataatttggaagcgccggataattttgcgcgttcttctaagccgtccagttcttctccctgtccgcagtcgatgcagcagcagatgacctcataatcaaaattttctttgagccatgggatgatggctgttgtgtccaatccgccggaatatgctaaaattactttttctttcatgtcaaaagtcctccttgttctgtttgtcttgaaatttgatagtattaatatacaacaaaatgaataaatatgcaacaagaaaatttgaaaaagagaaatgagattaaaaaagcaaagcaaactgttataggaaaacaaatgtgcactagggggaaacatactagtttttatagaaaaaagagtaatgtaaaaatgaaaaaattcgtagagaaaaacgaaaaaacacttgtatttacttataaaatgcaaaatgtgagagggaaaacaagaaaatgaaaaacggagaaggaagttatggggaaagaggaaagcgataaaagcagatttgggtgcaaagtaaaattgtacaaaataaaatgcaaaaaaactattgcataacattttaaatagatgtataatcatgcaaaatcaaaatttattcgatggaaaaagagagaaagggtgttatagatgattcgtgcaggaataattggtgcaacggggtatgccggaggagaattagtcagacttttggctggtcataaggaagtagaagtagtatggtttggctccagaagctatcaggagattccttatactaatgtttaccagaatttatttcagattgtagaaggaacgtgcggggaaaaggaaatggaggcacttgcggatgacgtggatgtaatctttactgcaacgccgcagggattttgtgccggacagatcagtgagacggtgctagagaaagcaaaagtcattgatctaagtgcagattttcgcttaaaagaggcagaaacgtatgaaaaatggtataaaatacaacagaaaagcccggaacttttgcaagaagcagtctacggactttgcgagtggaatcgggagcatattcgatcagcaaggctgatcgccaatcccggctgttatccaacgtgttctttgatggcgattcttccattggtaaagaatggactgatagttccggagacgttgatcatcgatgcaaagtccgggacatcgggggcaggaagaacggagaaaatagataacctttattgtgaagtcaatgaaaatatgaaagcatatggggtgaccacacatcggcatacaccggagatcgaagaacagctgtctcttgttgcaggggagaaggtatgtgtgaattttaccccgcatcttgttccgatgaatagggggattcttgtgaccgcctacgcatcactaaaacaaggtgtgacggaagaaatggtaagagaggcatatgacagttgttataacagcgagaaattcgttcgtgtactgcgaaccgggatatgtccgcagacgaaatgggtggaaggaagcaactatgtggatgttggatttcagattgatcagcggaccaatcggattgtgatcctgggagcgatggataaccttgtgaagggcgctgcggggcaggcaatccaaaatatgaatttgatgttcggactggatgagacggaaggactgactgcaatcccgctgtttccttagaagctacagcaggaaaaaagaagaaaaagacggaaaaaggagaggcagaacgatgatacgcgcaatgatgatagaagactatgagggagtttataagctttggaaacagatcaaaggatttggaatccgtagtatcgatgactcgcgggaaggactggaacgtttccttagaagaaatccgactaccagtattgtggcggaggaagaaggagagattgtcggcagtattttatgcggacatgacggaagaagaggttgcttttatcatgtatgcgttgctgaagaacatcggatgaaaggaatcgggacacagatggcaaagatggcgatggatgcgctgagagcagagaagatcaatcaggtctgcctgattgcatttacagacaatcaggttgggaatcagttctgggaacaaagcggatggaagcggagagaagacttaaattattatgacctctctttaaacgaagagaatgaaacgacatttaatcgatagaaggcagaaataacaggcagcaaagaaaggaaggaaaacagagatgaagcagatcaaaggtggaattacagtggtaccgggatttgaggcggcagcggcagcggcccagatcaaatacgaggggcgtacagacatggcattgatttacagcagtgttccgtgtgtggcggcgggaacttttacgacaaatgtggtgaaggcagctccggtaaagtgggatcagaagattgtcaaacaaggcggagcggtgcaggcgataattgtcaattcgggaattgcaaatgcgtgtaccggagaagaagggatgcaatattgtgaacaaacggcacagacagcggcagaagtgttcgggattcagaaagaacaagtgctggtaagctctaccggagtgatcggaaaacagcttccgatggagaaaatccaggcgggaatccatatgcttgcccaggcaaaaggcaatgacaaactttgtggaacagaggccgcagaggcgattctgacaaccgatacgcataaaaaagaggctgcagtacagctggagattggcgggaagacagtgacgatcggtgcgatggccaaaggatccggaatgatccacccaaatatgtgtacgatgctttcgtttcttgtgaccgatgctgtgattgaaaaagaagttttacagaaagtattaagtgaagatgtagaggagacgtataatatgatttccgtagatggagatacttctacaaatgatacggtcttgtttcttgcgaacggactggcacaaaatgctccgatctgtccgggtacagaagaatataaagcatttgcagcagcagtacatacggtcaatgagcagctggcaaaggcaatcgcaggagatggagagggcgctacggctcttctggaagtggaggttgtcggagcggcagataaagagcaggcaaagaaaatcagcaagtcagtcgtttgctcgaatctgacgaaaacagcagtggcaggtcatgatgcaaactggggaaggatcctctgtgcgatgggatatgcaggcgtttcatttgtaccggagcaggtagatctctttttggaaagtgcagcaggaacgattcagattctttccgatgggatggcacttccgtatagtgaggagaaggcgacggagattttatctgaggaaaaagtaaaaatccttgcagatctgaaactgggggatgggaaagcgactgcatggggctgtgacttgacacacggatatatcgatatcaatgcagattaccggagctagcataccaaacagaaatgatgcagagacaaaaggaaggaagagatagagatgagccagaagatgcaggaatatttgaaaaaagcggaggtactgatcgaggcgttgccgtacattcagcgatttaaccgaaagatcatcgttgtaaaatatggtggaagtgcgatgatcgatgagacattgaaaaagcgggtaattgaggatgtgactcttttaaaattggtcgggttcaaaccaatcattgtccacggaggagggaaagagatcagccggtggatggagaagactggaaagcagcctacgtttgtcaacggacttcgcgtgacggatgaggagacgatggaagttgcagaaatggtgcttggaaaggtgaataaagggttagttcagcttgtggaatcgctgggagtgcgggccatcggtctgagtggaaaagatggtggattacttcgggcgcagaagaaattttcagacggaaaagacatcggatttgtgggggaagtgacatcggtggatgcaaatgtacttttggatcttctggagaaagatttccttcctatcatctgtccgattgggctaggagaggattatcagacttataatatcaatgcggatgatgcggcatgtgcgatcgcgcaggcggtacatgcggaaaaattagcgtttttatctgatgtagaaggaatttgtacagatccggcagatgcctccacgttgatttcagaattgacaattcaagaaggaaaacagctgatcgagaagggaacgatcaccgggggaatgattccgaaactttatagctgtatagaggcaatccaggcaggggtatcgagagtccatattcttgatggaagaatcccgcattgtctgttgcttgaaatttttacaaacagaggaattggaactgccatttttgagggagaaaggagcagattttactatggaccagacaatcagtaaggcggaaagtgctatcttacatacctataatcgatatgatcttgtgttggaaaaaggagacggtgcttacctgtatgatacagatggaaaagcctatttggattttggctcggggattggtgtcagttctcttggatatggaaacaaaacattgcagtctgcattgaaaaaacagattgatcagttgatccatacatccaatttatattatcacgaaccgcttgcccaagcggcagaaaaactgaaaaccatctcgggaatggatcgtgtcttctttgcaaacagcgggacagaagcaattgagggcgctttgaaaacagcaagaaaatatgcgaagcaaaaaggaaacagtgcctgcgagattatttccatggaacattcctttcatggccgcagtatgggtgcgctgtcggtgacgggaacggaaagctatcgggaaccgtttgaaccacttgtaggcggtgtgaaatttgccatatttaatgatctggaaagtgtaaaagaacaggtgacagagaagacaggtgcaatccttctggaaccggtacagggagaaggtggcgtctttgtggcagaacagtcatttctgcaaggacttcgcacgctctgcgaggaaaaagggattctgttgatctttgacgagattcagtgcggcatggggcgaaccggatcaatgtttgcgtggcaaggatatggggtacagccggatatccttgtgatggcaaaggcaatcggaaacggagttccggtcggggcttttgcaatgaaagaggaggtagcgcaaaactccttaaaaccgggtgatcacgggacgacttacggcggcaatccacttgcatgtcaggcagtcagtacggtgatcgatctttttacagagcagaagttagcggaacatgtgcgcagattgactccgtaccttgaagaaaaattagatactttacttgcaaaatacgatctgtttaccgggagaagaggaaaaggatttatgcaggggttgatcacttcttgtccggccggaaagattgtggaggcggcgaaacaggagggacttttgcttgtgacggcaggcgcgcaggttgtaagattccttccgccgctgatcattactgaaaaagaaattgacgaaatgacagaaaagttagagagagcacttgttcgtgtttgttaaaagaaagcagatgatgctcatttttataagtcacatgatatagaaaaatgaatttttgattgggatcggggcataaaaatccggtcattggatacactggaaagaaatagatgttacaaaaagtgacgaatcattctgggagggagtccgatgactggattttttattgcgttgctctctggggcgctgatgagtgtgcagggagtttttaacacacaggtaacaaaaacaacggggatgtgggtgtccaatggctgggtacaattttctgcttttgcggtttgtcttgtggcatggctgatcgcaggcagggatagtgtgatggcacttggaaaagtagagccaaaatatatgctgctgggaggtgcgattggagctggaattacgtggaccgtgattaaaagtatggaacagctgggacctgcaaaagcggcgcttctgattgtgatcgcacagttgatcgtggcatatgttattgaagtactgggattgtttggtgtggagaaatcaccgctggaatggcgaaaagtaggagggatggctctggctttgatcggtattgcgatttttcagtggaagtaaagaagaaatctaagaaataaaaaagccggggaagaattggttgtaattctgaggtaaattcgatacaatatatgtgactttgcatatgaggggatttatagagaatatctataaaggagaaaatatgtataagcaaaagaaaaatgaaaagagcactaagaacaagtggaagcgcagcagaagtaggatgtatggaatcgggattctgatagtgacgctttgtctgacagcctgcgaaaaagaggagcatcggatggaagaggtccaattggaagagatcgaaaaaagtgaatcggactcagaagagcggcagaaccaatctgcgtcggaagtgccggacggtgaaaggcagccaaaaacgatctgggtgtatgtatcgggtgcagtctgtacaccaggtgtatatgagctgccggaaggatcccggctttttgaggcactggagcgtgccggaggaatgacggaggcggctgaccaaagttttctgaatcaggcagaacttttgacggatggggtacagattcaggttccgacaaaggaggaggttgcttcgagaattgtggcagaagcaaatacttccggtgcgcccggagaaagtggaaagacttctcagggaaaggtgaatttaaatactgcgacaaaggaagaacttatgacacttcccgggatcggtgaggcaaaggcagatagcattcttacctatcgggaatctgcaggcggctttcagtccattgaacagatcaaagagatcgagggaatcaaggacggtgtgtttgaaaaaataaaagaacggatcacagtctgaatgctctggtaagggagagtttatgggaaataagatattggttgtcgatgatgaaaaattaattgtgaagggaattcggtttagtctagagcaggatggaatggaagtcactgctgcatatgatggggaagaggcgttggcgcttgcaaaaagcggtgagtttgacttaattcttctggatgtcatgctgccgaaactgacaggatttgaggtctgtcagcaggttcgggaattttcggatgtgccgatcattatgctgacggcaaaaggggatgatatagataagatcatgggactggagtatggtgcggatgattatgtcacaaagccgtttaatattctggaggtaaaagcaaggatcaaggcaatcatccggcgtacgaagaaagacagaccggaagaacagaagaatctgatcgtaaagggagagatgaagttagattgcgagagccgccgtgtctttatcggagagcgggaagtcaatctgactgcaaaagaatttgatatgctggaactgcttgcgctgaatcagaataaagtgtacagcagagagaaacttttgaatcttgtctggggctatgattatccgggggatgcaagaactgtcgatgtacatatccgccgcttgcgggagaaaattgagagccatccaagtgatccaaagtatgtgcatacaaagtggggagttggttattattttaggggataagatatacttccgcggtaagttctttaaaagtctccgttttcggatcatgttgcttttgatcgtgattggaattatcccgtgtatcgttgtcgggcagggaatcatcagcaattatgaaaagagagcggtttccgtgcggacggcggaaattcagaatcagagcacaatgctagggagtcgtcttggaaaagcgggctatttaaagggagtaccgtcagaaacattggatgcggagctggcacagcttgctgatatttacagtggcagaattcttctgatcgatgatgagtttcaggtagtcaaagatacttatgagatggaagaagggaaaacaatcatttcagaggcggtgatggagtgctatgagggaaacaatacaagcgagtatgattcggaaaaccactatattgaggtaacgcaggcaatccaggatccgaatagcggacagactgaagggatcatgcttgtcagtgtttccaccgattccgttgtggacagtgtagatgttctgcattccaaagcggttgctgtggagattgctgtcggagttgtgatcattaccatttccttttttatttccgcgcttcttgtgcggccgtttggaagaattacacaggcaatcggagctgtgacggaagggtatgatacggacaatcttcacgagaatgcctataccgagacaatgctgatttctgatgcatttaataagatgcttggaagacttaagattcttgatgattccaggcaggaatttgtctcaaatgtctcccatgaactgaagacaccattgacttcgatgaaagtgttggccgattccctcctggcacaggaaggcgctcctgcggaattgtatcaggaatttatggaggatatcgcggcagagatcgagcgggagaataagattatcaatgacctgctgtcacttgtcaagctggacaagacgtcggcggatttaaatatcaagtcagaaaatatcaatgatcttctggaattgatcttaaaacgtctgcggccgattgcggtacaacataatatcgaagttgtatttgaaagtttccgtccggtgattgcggaggtggacgaagtgaagctgacgcttgcgatttctaatctggtggaaaatgcaatcaaatataatcatgaggagggatgggtgcatgtctctctgaacgcagattataaatatttctatatcaaagttgcagactctggtatcgggattccggaagatgccgtcgagcatatttttgagcgtttctatcgggtagataaatcacattcccgagagattggaggaaccggacttgggcttgcaattgcgaaaaatgcaattttaatgcatagaggaattgtgaaagtacacagtaaagaaggggaaggaacgacgtttactgttcgtgttcctttgacctatattgcgtaacattccggtgagcagaaatgaaagggaagacaaaaagagagaagatgacaggaaatttgaaaaagaaaatcggaattgggctgcttgtggtactgggaatcatgttgcttgctgcatgtgggaaagaaaagaagagtgtttccggtgatggaatttattacatgaacagtgaggagacaactattgagaaagaaccgtatcagatcaaagagaaagatgcagagaaagctgcacgggcgatgttaaaagcactttccaaagcgccggaggatgtggagatgaaaccggtgatctcaaaacaggtaaaggtacttggatttgaggtgcaagagggaaagatcacagttaattttggcggaggatattatgagatgggagcggtccgggaggtactttgccgggcggcgatcgtccaatcgcttgtgcagattgatggcatcgagtcggtcgcatttgaagtagagggcaatccactgacggataaggaaggacaggttgttggaagcatgcgggcagaagattttattaaaaatacaggttctgcgctgcactcttatgaaaaaacggaccttacactgtattttggaaatgaagacggtactgcgcttgtgccggaggtgttagaggaggtacgctacaatacgaatctgtcaacggaaaaacttgccatggagcgtttgctcaaagggccggcatcagggaaacttcagccggtactggatgctaaagttcgtctgatcggaacttctgtcaaggacggaatctgttatgtcaactttgatgacacctttcttcagcaggaatcgcggatggatccggtgctgcagatagaggcgcttgtccgttccttgatggaaaacggaaaagaaatccgggcagttcagatcttagtcaacggaaaaagtgaccaaagctacaaaggcatttctctggaacaaccgtttgacggcgaagctattaggaagaaggaggagcagaagtgagaaagaaaccactctgtctcctgtgcatcttctttttgctgctcaggctggcagctactttgataatggggaaaacgatggacaatcctgcttttccctcttctacaacaattcagatagaaggcactgtccttcagaaatcaatcacatcaaaacaacaaatcttgacaattggaaatcttgaaaaacaatccagacagaaaaagaagcaatatattgagaaagaaacaatagtgatttatgacgattcgttccgtaaagtaaaaatcggcgatcgcatttgtgtaaaaggagatggagagacttttgaagaagcacgtaatcctgggaattttgatcagagagagtattatcggaagaaacatacaacaggatttttgtgggcgaaagagatcttggtcacggagcgggcaaaagtttctttaggggagatgctgtttcggatgcggcagaggagcagggaagtgtttgaatattgcctgggaaagaaaaacggaggaattcttgcggcaatggtgttgggcgagaaagcggggatggatccggaagtgaaagaactgtatcagaaaagcggaatcagccatttgcttgctatttccggtttgcatatatctttgatcggcaatgccttctaccaatggctccggaaaggaggatgttctttttgtatagcggggattacaagtgcggttgtgcttgggggatatgcatgcatgacggggatgagtgtatctacacaacgagcttttttcatgttccttcttcggattggtgcagatgtagccggaagggtctatgacctgccaacggctctggcagtggcagcagcatggatcgcagcagaagatctggacgatttgacagacgctgcatttcttttgtcttttggggcgattcttggaattgtgcttctctgcccaatatttcaggaaatttttgcggggaaaaagaaatggttacagacattatccggaagtctggcaattactgtcatgctccatccgatcctaagttttttctattatgaaatatcgctgtatgcgatctttctcaatctgcttgtcatccctctgatgagctggatccttggcacagcaatcattgggctttttctagctgttttgtggatgccgggtggcagtcttgttttaaaaagcagtggatttcttctggaaggttatgagttactctgtaggatgtttctgaggcttcccaatgctgttgttgtgactggaaaaccggaaatctggaagattgtgatatattattgtctgctttttgcatttgtgatgtggtggagaagaaagataatagaaaagaaaatggaagaaaagaaagggaaatggaaaaaggaagttcagaaccgagtatggaactggaaacaaaaggtaggaagtgtgttgtggatcacagggttggcattgattcttattattgagattggaaaagaagaactggaagtgacatttcttgatgtagggcagggagatgggatttttcttcagacagatacgggattgacttgtatgatcgatggaggaagtaccgatatcaaacaggtggggaaatatcggattgaaccatttctgaaatcaaaaggagtcagaaagctggattatgtttttgttacacatggagatcaggatcatttgaatggaattgtagaactgatggaacggcaggcatatggaatctccatcgacacacttgtgcttccgagaaaggacgtatgggacgataccctttggcagctggcatatcaggcggatatgcaaggggtgtcggttgtggcgatgcatgagggagaatccgtggaagatgctcgcatttccatcgaatgtatccacccggcagaaaattcagaagcagatccgggaaatgctagctccctcgtgctgaaagtaacttgtcaaaacgtaaaactactcttaacaggggatgtggagggaaagggagaagaagaactgattgacagattttctgaagaaatctttcttttgaaagttgcacaccatggatcgaaaaattcaacgagagagttgtttttagaacaggtcaaaccaaagtatgcgattatctccgcaggacgtaacaattcctacggacatccaaatcaggagacgattcaacgtttgaaacaatctggggtaaaaatctatagtacacaggacaatggagcgatttgttttaggattgacgatggaaaggggtatttgtcaggatggaaataggaaggtggcgcaaagaaaactggcatgctatcctctttacgtagtgggaacatctgtgatatgatgaaaaaggattttcaggaaacggaaagggcagaagtgatcgatgaaaagtttaaatgaagatttaaagacaggagaatttaagcagatctatctgctgtatggggaagaagtatatctaaagaaacaatataaagaccggttgtcaaaagcgattgtcaatgaaggagatacgatgaattactcttattatgaagggaaagggatccacccgggagagttgatcgatctggcggagacgatgccgttttttagtgagcgtcgtctgatcgttgtggaaaattcgggatttttcaaaaatgccaccccggagctggcagattatttgaaagaacttccggagacatcctactttctgtttgtagaagaggaagttgacaagcgaggaaagctttataaggcagtgaaagcaaaagggcgtatcgtggaactgggacggcaggacgaacatacactggttcgatggatccttgggatggtgaaacgggaaggaaagcagatttccgagcgaactgtacagttccttctcgcaaagaccggggatgatatggagaatctccagagagaattggaaaagctgttttgttatacactggagaaagatgcaatcacagtggaagatgtggaggaaatctgcacgacacatatttccaaccagatttttgaaatggttgcagcagtcgccgagaagaaacaaaaaagagcactggaactttattacgatctgcttgcgctgaaagaaccgccgatgcggattttgtttcttcttgtccgtcagttccgcctgcttttggaggtgaaagaactagatcagagcggatatggaagaaaagaaatcggagaaaaaacaggactgcacacgtttgttgtcggaaaatatcaagggcaggcgaagctttttaagaagaaggagctgagagagattctggagatggcagcagaccttgaggaaagtgtaaagacggggcggctgacagacgcacttgcgacggaacttttcattgtaaaatacagtatggcatgatataataatgcgatgttaaaaagaaacaacgcctcagctttcgggaaaggaagtgaaaacttctttgtatagatcattttggctgagggatagagatagagagatggaggaattttagtggcaggaatagatcagagtaagatacgaaatttttgtattattgcacatatcgatcacgggaagtcgactttggcagaccggatcatagagaagacaggactgctgacaagtcgtgagatgcagtcacaagtgcttgataatatggagctggagcgggaacgtggaattacgatcaaggcgcagacagtccgcattgtttatcaggcaaaagatggagaagaatatatttttaatttgattgacactccgggacatgttgacttcaattatgaagtatcaaggagccttgcagcatgtgatggtgcgattcttgttgtggatgcagcgcagggcgttgaggcgcagacactggccaacgtgtatctggcactcgaccatgatctggacgtgatgccagtcatcaataaaatagatcttccaagtgcagagccggaacgggtgatcgaggaaatcgaagacgtcattggaatcgaggcagaagatgcgccgcggatctctgcaaagacagggctaaatattgatcaggtattagagcagattgtcgagaagataccggcgccgggcggagatccgaaatcaccacttcaggcgttgatctttgactcggtgtatgacccatacaaaggagtgatcgtcttttgccgaatcaaggaaggaactgtcagaaaagggactccgatcctgatgatggcgaccggggcgaaagcagaggttgtagaagttggatattttggcgcaggacagtttatcccatgtgaagaactaagtgcaggaatggtaggatatatcactgccagcttgaaaaatgtcaaagatacaagagtcggagatactatcacagatgcatccagaccatgtgcggaggcattgccgggatataagaaagtccagccgatggtgtactgtggactttatccggctgatggcgcaaaatatcaggatttaagagatgcgctggaaaaacttcaattaaatgatgcggcgctgcagtttgaggcggagacatccgttgcgctgggatttggattccggtgtggatttttaggtcttctccatctggagatcattcaggaacgtctggagagagagtacaacttggatctcgtgacaactgcaccgggtgttatttataaagtacacaaatcaaatggagaagtgatcgagctgacaaacccatccaatctcccggatccggcagagattgaatatatggaagagccaatggtaaaggcagagattatggtcacatcagaatttatcggggcaattatggatctctgtcaggagcgacgcggggaatatcaggggatggaatacatcgaggagacgagagcggtgctgcggtatcatcttccgttaaatgaaattatttatgacttttttgatgcgctgaaatctcgttcgagaggctatgcttcctttgattatgagatgcttggctatcagcagtcagagcttgtgaaattggatattttgatcaacaaagaagaagtggatgctctttcctttatcgtacatagcggaacagcctatgagcgtggacgcaagatgtgtgagaaattaaaagaggagattccgagacagctgtttgaaattccgatccaggcagcgattggaagcaaggtcattgcccgtgagactgtgaaggcgatgagaaaagacgttcttgcaaaatgttacggtggagatatctctcgtaagagaaagcttctggagaaacagaaagaaggaaagaagagaatgcggcaggttggaaatgtagaaattcctcagaaagcattcatgagcgtgttgaaactggacgacaaatagaggaaagagagctgtcgaaaacaagaaagtcgataatagtttacatggattttccatttttttgaaaaaaataaaaaaatatgaaaaaacatattgacatttgagaaaaaatagtagtataatagcagagcgggttagcggtgagcgaaacccgcaggaatatgggatcatagctcagctgggagagcatctgccttacaagcagagggtcataggttcgagccctattggtcccatttctatgaaaagccttcatagagaattatatatggcgggatagctcagttggctagagcacacggttcatacccgtggtgtcgcaagttcaaatcttgttcccgctattagatgggatcatagctcagctgggagagcatctgccttacaagcagagggtcataggttcgagccctattggtcccatttatatgaaagcatttcataggagattatatgtggcgggatagctcagttggctagagcacacggttcatacccgtggtgtcgcaggttcaaatcctgttcccgctatttataaaaaattatataaatatatggcgggatagctcagttggctagagcacacggttcatacccgtggtgtcgcaggttcaaatcctgttcccgctactattaaaagtatagagaagtatcaaagaaaaccgggagaatattcttcggttttttttatttttcttgatgttttttttgttttcaagtacaataaaagaaataaatacaaaaaggctgttacaaaaggaaacattccggtttgcaacagccttttcgacagaggagtaagaaagatgaacgacaaaagcagaatgattttaaaaatgctggcaggcggatatattctttatatcggaatttcccttctgatcggtgttcttcagacagaacctaatgaaaaagtattgatgatcatcgtcagcattttctttatggcagtaggtggaaccgtactctatctttctgtgggagcattgctgaaagaatatggagtggatattgagttctggaaacagaaaaacaaaaaatccgaggagaacggggaaatcgaacagacggacagaagaatgtcggagggaaattcaaatatcaatttccaggatctctcagaaagtgccaaagaggaacaggatcaacaggaaaacttggaatcacaggagaaatctgtccaagaagaggaggctgtgcaggaagcggaatctgaagaaacatcacaggacgagattgaggaagacgatttaaacgaagagccgcttgatccggaagaagatttgccgcaggaaacagaagaagacggttctgaagaagaaatggatgaggagcaggaagaagacgaggatatcgtacagatagatgaaaaggaagaaaaagaggaagtgacagaagaagtgacagaggagaaggtgcaggaacatcaagaagagtcagaaacttccaaagaaatgttcccgagaagacaggcctctatcagcccaatgccacagagaaaataataagaataacagagaaagaggtgccattatgcgtgtaggacttggttacgatgttcacaaattgacagaaggaagagatttgattcttggtggagtgaaaattccgtatgaaaagggactccttggtcattcggatgcggacgtgctgctccatgcgatcatggacgcgcttttgggagcggcagcacttggagatatcgggaagcattttccggacacagatgagagatacagagggatttccagcatggaattgttaaaacatgtcggaaaacttctggaggaaaaattgtatttgattgagaatattgacgcgacgattattgcacagcgtccgaaaatgcttccgtatattgaacagatgcgggaaaatatcgcggaggtacttggacttgagaaagagcagatcaatatcaaggcaacgacggaggaggggcttggatttaccggaagcggagaagggatctcctctcaggcaatctgtgcaatcgagagtatgcgtactatgagctatcaggtatttgcggaagaaagtgcaggcggctgtcaggggtgtggaggatgccggaagacgtctgaaggaacggagcgataagatggaagtgagaatgcttcaaagagaagaacacggacggacaagagaattgtgggaacgtgtatttgcagaggatacaaaagaatttcttgattattattatacggtgaagacgttggacaatgagatgtatgtgattgagcaggagcatcagatctgttcgatgatccagctgaatccatatgaaatgcggatcaacgattctgaatttctgacacactatattatcgcagtggcaacagaggagcgattccgaaagcgtgggtttatgggcgcacttttgcaggcatctctaaaaaagatgtatgccagaaaagaaccgtttacttttttaatgcccgcagcggagagtatatatcacccttacgattttcgatatatttaccgacagagaggcggaaaagtttgtggaagcaaggagaggtcggtatctcacgaacttcagggaaatatctatgagatgcgggaggcatctgaaaaagactgcagaaagcttgcagagtttgcagaagagattctgcggcaatcatatcaggttgtggctgtccgtacggagcagtattatcggaggatgcttgcggaacagaagagtgagcatggtgggattgggatgatcgaaaaaaacggaaaacttgtcggaagtttcttttttgcaaaagaggagacctatgaaatccgggaaccgcttctgaagaaaggagaggaagaggcacttcctcaggcagtattttggctgacgaaagggaacgaggcgattttttgcgacggttggaatctggatgtacacaatattaaaaaaagtgtgaccgaagagagagacagaccgcttattatggcaagacttctttaccttccgggattttttgagagtcttcgtccaaggacaacattttcttttacagtagaagtgacagatccgcttctggaagaaaataacaggagatttttgctggaaagcgatgggacaaagattgcagtcagcacagcggcaaaagaaaatgatacagatcggcagatttcgattgcagctctgacacaggtcctttttggatgggaaccctatacggaagaaaagctgtcggaagcactgcagaaagatttgaataaaatcgaacctgcagatggtgtctttctaaatgaaattgtatgaagctgctgcttgtgaagaaaacggttgacaaaaatgattttattgcatacactgatgtatagatattatgaaaaaggctgagaacgaaaagagtaatagatttggaactgacagagagagtgtgtcaccggctgaaagcacgcttcaggaaagtgtctgtgaagtgcattcgggagctgatccggcgaaagaaagtagctggatacgttggcatacgttacatgcatgaaagtgaaagtctgaacaacgggcagattttcagaagagtggaaccgcggataaacttcgtctctttagggagatgaagtttttgttttatatgggaaatcagaaggaggcagcaggatgggaatggtttcttacatcagggaggagattgcggtgatccgagaaagggatcctgcgatcaagacaactgcagaagtgtttttatacccgagttttaaagcaatccttcactaccgggcagcgcataagctgtaccagaacaggcattattttctggccaggtggatttctcagagggcagtaagaaagaccggaatagagattcatccgggtgcagtgatcggaaagggactttttatcgatcatggaagtggagtgatcattggtgagacagcagtgcttggcgataatgtcaccctttatcagggagtgacacttggagggactggaaaggaaaaagggaaaaggcatccgactttggaggataatgtgatggtcagtgccggagcaaagattcttggttcttttacgatcggagaaaatgcaaagatcggcgccgggtctgttgtgttaaaagaagtgccgccgaattgtacggttgtcggagtgccgggcagaattgtccgaatgggcagcgaaaagataccgcggacagacttggatcagatccatttgccggatccggttctcactgatattcacgcattgcaagaagaaaatcttcgtctgaaaaatcaagtgatggagttaaagcaaagtctgcagcaatgccgcttggaaaaagaagaaaaaaaggggcagaaaaaagacggaaaaaagccaaaagcaaaaaagaaaaagagcaggaggaagaaagatgaaactgtataacacattgacaaagaaaaaagaagaatttgtaccgttagaagagaagaaagttcgcatgtatgtttgcggaccgacggtatacaattttatccatattggaaatgcaagaccgatgatcgtatttgacacagtgagaagatattttgaatacaaaggatatgaggtaaacttcgtatcaaactttacggatgttgatgacaagatcattaagaaggcgatcgaggaacatgtatctgcggaagaaatctcccagagatatatcgcagagtgcaaaaaggacatggaaggcatgaatgtcaagccggcgacgactcatccactggcaacacaggaaattgatgggatgatcgagatgatcggacagctgatcgaaaaaggatatgcctacgagaaaaacggaacggtatatttccgcacaagaaaatttgggccttacggaaagctgtctcataaaaatctggatgatttacgatccggcggaagatctcttcttgtaacaggagaagatgagaaggaagatccacttgatttcgtactttggaaaccgaagaaagagggagaacctttctggaaatcaccgtggagtgacggccgtccgggatggcatatcgagtgctcagtgatgtccaaaaagtatttgggcgatcagattgatatccatgcgggaggagaggatcttgtatttcctcatcatgaaaatgagatcgcacagagcgaggcggccaatgggaaagagtttgcaaaatactggatgcacaatgcatttttaaatatcgataatcgaaaaatgtcaaaatcactcgggaatttccgtacggtgcgtgagattgcagaacagtatgatctgcaggtgctccgtttctttatgctgagtgcacattacagaagtccgctaaactttagcgcggaactgatggcggcttctaaaaatggactggagcgtatcattacggcggcagagaatctgaaatatcttgcggcaaacgcaaagaatggggagatgaccgatgccgagaaagcacaaatccaggaaactgagaagtttgtcactgcgtttgaggaggcaatggaggatgactttaatacggcagatgccattgcggcaatttttgagcttgtaaaatttgcaaatacaacagcagatgaaacttcttctcaggcatatgacagcgcgcttctggaacgcattgtacatttgtccgatgttctcggaatcattgtagtgaaggaagaagaacttcttgcagaagatatcgaagcattaatagaagaacggcaggcggcgagaaaagcaaagaatttccagcgagcagatgagattcgtaacgagttgttagaaaaaggaattattttggaagatacaagagaaggagtaaaatggaaaagagcatagaacaagatctgttttcctgtatgcaggagacattttccttaaaagaagtagatatccgggaatactctccactgacactggcatatatcggggacagtatttatgatctgatcatcaaaacgatcgtgatcaatgaaggaaataaacaagtacagaaactgcacaaagagacgagtgctcttgtgcaggcatctgcgcagtcaaagatgatgcggacacttcagggagtgttgactcaggaggagctggctgtttataagagaggaagaaattccaagtcagtttccccggcaaaaaaccaatctgtgacagattaccggagagctacagggtttgaggcacttatggggtatctgtatctggagaagaactggacgcggatggttgagttgattcgattgggattagaaagtttgaatacagaggagaacaaagatgagtaaggaaataaagatagaaatcaagtcactgacgatcgaggggagaaatgcagtgctggaggcattccgttcgggaaaaccggtagataagttatttgtccttgatggatgtcaggacggaccggtccgcacgattgttcgtgaggcaaaaaagcacgatacgatcttaaatttcgtttcgaaggaaaggttggatcagctgtcagaaaccgggaagcatcagggagtcattgcgcatgcagcggcttatgaatattctgagattgaagatatgtttgcgcttgcagaaaagagaggggaagatccgtttttcattctgcttgataatatcgaggatccgcacaatcttggagcaatcatccgtacagccaatcttgccggtgcacatggggtgattattccgaagcggagagcagtaggacttacagcgacggtagcgaaaacttcggcaggggcattgaattatactcctgtggcaaaggttacaaatcttgcaaagacgatggaagagttaaaagagcgtggactctggtttgtctgtgcagatatgggcggagagtccatgtaccggatgaatctgactggtccgatcggtcttgtgattggaaacgagggagagggagtcagccgtcttgtgaaggagaagtgcgattttgttgcttccattccaatgaaaggggatattgattccttaaatgcatcggtggcagcaggagtgctggcgtatgagatcgtaaggcagcgtggatagatggaaacgtatgagaaaatgacagatgagcagctgatcgcggctctccggaaaggagagtctgagattatggatttcattatggaaaaatataaatatctcgtgcgaaaaaaggcaaaggcgatgtttcttctcggaggagaaaatgatgacctgatccaggaggggatgatcggactttttaaagcggtccgggattatgatcttgcgctggaaacttcgtttgcaagctttgcagaactatgcatctcgagacagatgtacagtgcgattgaggcatcaaagagaaaaaaacatattcctctgaattcttatgtttctctttacgaggagggggatgcgtctgaggaaaacaagcgtccgccgttgatcgatacgatccagccggatagggagaacaacccggaagaattgttcctgaataaggaatatttccggcaggcagaaagtatgctcaaagaacagctcagtgatctggaaaaccgtgtcttatatttacatctgctcggtacagagtaccggacgatcgcaaaattgatcgggaaaagtcccaaagcagtagataatgcattgcagcggattaaaagcaaggcacagggaattttaaaccataagaaagaatgaagcatggtgcatgtgctaggaaacatacaaaaataattgaaaatcaaacactctcctcttgacaaggagagtgtttttcggtatagtatccatgttgacagtaaaatatgctgccttggcgcagtcggtagcgcgtcgccttggtaaggcggaggtcgggggttcaagtcccctaggcagcttcaggagagagtaagaatttttgattcaaaagttcttattctttttttattacatagacttcatacttgattgatggtaaactgtgtatagagtatgtggagcaggcacaatcagagaagtcggataaaaaacgaaatggagggaaataggatggcatcgtttttggaaaatattgagccgtttagaggaaccggcgagcggaacaaggatggacagacactggaagaatttctggaggggtatcagccgtatagatatgagacgccatcgtgtacgacagatgcggtagtattttcatacagaggaatggaagagcagattagagatgtcaatgcgcttgaggtacttcttgtaaagagaagtaaccatccaagcatcggattctgggcgcttccgggaggatttatcaatctccgagaagatttggaagagactgcaaggagagaacttcaagaagagacaggtgtcagcggactctgcatggagcagattgcagtttatggtgcgatggaccgggatccgcgcacgagagtgatcacaactgcgtacatggcgcttgtaaacagagaagagatctccgtcgaggccggggacgatgcggctgatgctgcgtggtgtaagatccgattgtcttgcgtggaggaacagaggaatggagacacaagtctgcaagtctatcggcttcagttgtttaatgaagagaagcagattgacacgactgcagttgtagagaaaaattgcaggggagagttggtccgggaagtctcctatcgggtgcgggagccggggaagattgcggtggatcacagtgcgatccttgtgcaggcacttttaaaactgcagggcagaatggaaggaagaatttcagcgggcaggtaaaatctaccttgttatcaattttattttatggtaagatattgaacatgaatgaaaacgaggaggatgacaatggagaacgaagtagtttctaaaaattttatagaacaggaaatagacaaagatttaaaagaaggagtgtatgataccgtctgcacaagattccctccggaaccgaacggatatttacatatcggacatgcaaagtccattctgttaaattatggtcttgcacagaaatacaatggaacattccatatgcgttttgatgatacaaacccgacaaaggaaaaagtagaattcgtcgattccatcaaagaagacattaagtggcttggcgcagattggaaagataatctgttctttgcctctgattattttgaagcgatgtatgaatgtgcagtcaagctgatcaaaaaaggcaaggcatatgtctgtgatctgacagcagaagagatcaaagaataccgtggaacattaaaagaaccgggaaaaaacagtccatacagagatcgctctgtggaagaaaatttagaattgttcgaggcaatgcgtgacggaaaatttgaagatggggagcgggtgctccgtgccaaaattgatatggcatcaccgaatatcaacatgcgtgatccgattctttaccgtgtagcacacatgacgcaccacaataccggagatcaatggtgtatctatccgatgtatgatttcgcacatccgatcgaggatgctattgagaagattacccactccatctgtacattggaatttgaagaccacagaccgctttatgactgggtagtcagagaatgtgagtttgatcatccgccgagacagattgagtttgcaaaactgtatctgacgaatgttgtgacaggaaagcgttatatcaagaagctggtcgaagatggaattgtggacggatgggatgatccaagactagtttccatcgcagcgctcagaagaagaggattcacaccggaatcgattaaaatgttcgtggagctctgcggagtatcaaagagcaacagttctgtggactatgcgatgttagaatactgtatccgcgaggatctgaaaatgaagaagcctcgtatgatggcagtgatggatccgatcaagctgatcatcgacaactatccagaaggggaagtagaatatttggatgttgccaacaatctggaaaatgaagcgcttggattccgcaaggttccgttctgccgtgaactttacattgaacgggaagattttatggaagagcctccgaagaaatatttccgtctgttcccgggcaatgaagtacgcctcatgcatgcatattttgtaaaatgtgaaagctttgtaaaggatgaaaatggaaacgtgatcgaagtacattgtacttatgatccagagacaaaatgtggaagcggatttaccggaagaaaagtaaaaggaacgatccactgggtaccggcaccgtatgcgacaaaggcagaacttcgtctgtacgaaaatattgtagatgaagaaaagggagtatataacaaagaggatggctctttgaacttaaacccaaattcgcttacggttttaaaagattgctatctggaaccaagtttcgatggtgtacaggcttatgacagcttccagtttgtgagaaatggttatttctgcgtagatgcaaaagattccagaccagatgcgcttgtatttaatcgtatcgtatcgctgaagagctctttcagactgccgaaataggagatataaatgaaagaattgacgatcagtcttgatccacagtcggttactccgctgtatgagcagatttatcagtatgtcaaagaagatattcagagtggccggcttgcatgtggagtaaagctgccatcttcacggtcacttgcgagatatctggagattagcagaagtactgtagaacttgcatatgagcagttactctctgagggatatattgagacaaagcctcgaaaaggcgtatttgtcgcacagattgatggagtatatcagttccgaagggaagagcaaccgggaacagagcgccaggaagagcagaaagaaaagtatcgctatgatttttcaccgagcggaatcgatctgaaaagctttccttatgcggtgtggagaaaactttcccgcgaagtccttctggatgatcgcgcagagacttttcgccttggagattcgcagggtgagtatgggctgcgcagtgcgatcagcagttatctgcatcaggcgcgaggagccaggtgccgcccggaacagatcattgtcggggcggggaatgattaccttttgatgcttttgatcaatattcttggaaaagacaagaaagtcgcctttgagacaccgacatataaacaggcttaccgtctgtttgcaaacttgtctcaggaagtgtgcacagtgccgatggatcacagtggcatgcggacagatcttctggaaaagagcggcgcgcaggttgcatatgtaatgccgtcacatcagttccctttgggggttgtgatgccaatccggcgaagattggagctgcttaagtgggcagacagaggcgagcggtatattatcgaagatgattatgacagtgaatttcgctataaagggaaaccgattccggcgctgcaagggtacgacattcatgagcgggttatttatcttggcacgttctcaaggtcgattgcaccggcactccgtatgagctatatggttcttccagagagtttgctttgcgtttatgagagggaatatcggtttatcaattcgacggtgtcgaagattgatcaaaaaatcgtagagcgatttctggcagaagggtactacgaaaggcacttgaatcgaatgcgtgcactctataaaagtcgtcacgatacgcttttaaatgcactgaaaccacttctttccattggctctgtcagcggagaatatgcgggagttcacttgcttttcacgtttcatgatgggagaagcgaagaggatgctgtcaaaaaagcgaagcagggtggaatacggatttatggattgtcaacatttgagacgcaggagatgcagagaagttgtacgatcctccttggattcgcaaacttaccggaagaagagatccgggcaggggcagcgcttctgacagaaaaattattggaatgacaaaaagggggaggcttactgtggcagcctccttttgtcaattggaaaaggcaaatgataaaagagaagggaaaagaggaaatcggatggaagtaaagaagaaaacgaagaaagggatttttcatatcgtatttagcaggactgcacttgtgtttctgcttcttatttttcaggtggtactgctgtttgagatgtttacaagtctcgtaaaatatgcgccggtaatgtatcttttactgctgatactcggcagtgctgtcgtgatctatattatcaatcgaaaggaaaatccggcatttaaaatgtcctggattttgtttgtgatggcgattccaatcgtaggaatgttattttatctgtttacccgtgtgcagattggaacacggtttatcgggaaaaggctccaggatctctcgcttgagacaaagccatatatggagcaggatgaggagatcatagaagatcttagagtatccaaaccagccaacgcaaatttggcacattatatgtcgcggcaggcaggatatccgattaagaggaacacaagtgtcaaatattttccgctgggggaagataagtttgagcagttgaaaacggaacttcgacaggcaaagaaattcattttcatggaatactttatcgtagaacagggaattatgtgggatagcatcctggaaatcctggaagaaaaggtgaaagaaggggtggaagtccgctttatgtatgatgggatgtgctgtatcgcgcttctgccgtatcattatccggagacacttcaggaaaaaggaatcaaatgcaaaatgtttagtccgatcaagccaattctttccacgcaccagaataacagagatcatcgcaaaatctgcgtgatcgatggacatacggcatttacaggcggaatcaatctggcagatgaatatattaatcagaaagaacggtttggacattggaaagatacagcggtcatgatcaagggagatgcggtacagaattttacgatcatgtttttgcagatgtggaatgtcacagaacatcagaaagaagattatgaaaaatatctgacgccggttcaggaggaattgcacagagaactggggtatgtactgccttatggagatagtccgttcgacaatgaaaacattggagagcaagtttaccttcacattttaaatcatgcaaagaaatatgtgcacattatgacaccgtatctgatcctggataatgagatggtgacgaatctgacgtatgccgcaaaaagtggaattgaagtcatcatcattatgccgcacattccggataagtggtatgcatttgcagtagcaaagacatactatgaagagctgatcgaggcaggagtacagatttatgagtacacaccgggatttgtccatgcaaaagtttttgtttctgatgatgacacggcgacggtcggcaccatcaatctggactatcggagtctgtatcttcattttgagtgtggaacctttatttacaacaatccggttgtctggaatattgaaaaagattttcaggagacattgaaaaaatgtcagaaagtaagtgtgatggatcttcggacaagaggaacagtgatgacggtagcaggaagagtgctgcgtctgattgctccattgatgtaggagattgtgaacagattttgtatgaaactttgtataaaggtttttttaaaagttttcaaaaaaatattttacatcaagaaaaaagtatagtataatcgttggcgtagtaaataagcagagcttgtaaatgtttataagaagataaaataagacatttatcgattaggaggataagacatggtaaaagcagtagtaggagcaaactggggcgatgaaggaaaaggaaagatcacagatatgcttggagagaaagcggacattatcgttcgttttcagggcggagcaaacgcgggacatacgatcatcaatgactatggaaagtttgcacttcacacattgccgtcaggagttttttatgatcacacgacaagtattatcggaaatggggttgcacttaatattcctgtgctctttggggagattcagtccatcattgacagaggagttccggcgccgaagatcctagtatctgacagagcacagattgtcatgtcttatcacatcctgtttgaccagtatgaggaggaacgactgggtggaaaatcctttggttctacaaaatcaggaattgctccgttttactcagacaagtatgcaaagatcggatttcaggttagtgagttatttgacgatgaattgttaaaagaaaaagttgttcgtgtctgtgaacagaagaatgttattttagagcatttatataagaaaccggcacttcgcccagaagatctttacgaagaattgcagagctataaaaagatggttgctccatatgtatgcgatgtgtccctgtatctgcacaatgcgatcaaggaaggaaaagaaattcttctggaaggacagttaggttctctgaaagatccagatcatggaatttatccaatggttacctcttcctcaacacttgcggcatatggtgcgatcggagcaggaattccaccgtatgagatcaagcagatcatcactgtctgcaaggcgtattcaagtgctgttggagcaggagcatttgtcagtgagatttttggcgaagaggcagatgagcttcgaagaagaggcggagatggaggagaatttggtgcaacgaccggacgtccaagacgtatgggatggtttgacgtggttgcctccaagtatggatgcagacttcagggaacaacagatgttgcatttactgtcttagatgtacttggatatctcgatgagattccagtatgtgttgcctacgacattgacggggagattacaacggacttcccgccgacttatttgctggagcgtgcaaaaccgcttctagagacacttccaggatggaaatgcgatatccggggaattaaacgctatgaagatcttccagaaaactgtcgtagatatatcgaatttattgaggagaagatcggttatccgattacgatggtttctaacggaccgggaagagatgagatcatctaccgctaagaagtttggcgtggatgtttaccggaaaacaatgatacaaacttagaatagaattttagaaaaaacatgccggaaaaaactgatttccaataggaaacagtaaaaatattccggcatgttttgttgttttacagggaagttattttagagaagttgaatctggtgttcgtctgccaaacgaagggtatcttcggtccaaatggaagactgcacctcaccgatgtgggcttttcggaggtagaacatgcagatccgagactgaccgattcctccaccgactgtgtagggaagctccccgttgagaagagatttttgaaaatccagttcggcacggtcttcgcagccggcgattttcagttgccgctttaaagcggcttcgtcaacacggatccccatggaggaaagttccagcgctacgtcaagtaccgggtaatacacgagaatatcaccattcaattcccagtcatcataatcaggagcacgtccatcgtgcggcttcccggagacaagagtcttaccaatctgcgaaaggaagaccgcttttttctctcttgcaattttatattctcgttcttttggagaaagcttgggatataggtcttctagttcctgagcagtgataaaagtaatgtcttccgggaggagcggttcgatgtaattgtatctgcgggaaataaattcctcagtttcttttaaggcagcatagactttccggactgtgtagcgaagtgtttctgtgttccgttcttctttggagatgatcttctcccagtcccattggtctacatacagagaatgcaggttgtcggtgtcttcgtcgcggcggattgcactcatatcagtatagagtccctcgccggagtggaaatcatagcgcttcaaagcatatcgtttccacttggcgagagagtgtacgatctccacaggagcatcgttctgttcccggattccaaaagaaaccggacgttcggttccgttgagattatcattcagaccactttctggttttacaaaaagaggagcagaaacacgggtgagatgtaaggatttggcaagcgcgcgctcaaaatgatctttgacttccttgatcgcaacttccgtttcccggattgtgagtggagagtgatagccttcaggcaaaataaattgttccatgataccataacctttctgtcaaaattttatgtttgctttgttgatgagatttagtgtagggatactcaggaaaaatgtcaaggaaaatgcagaaaaacttagaaaatacattagaaaatcttaataattagattagaaagggtttagagatctgtcatagggatgtcacaatttcgatttataataaagttatcaagtgaaaacttgagaaaaacaataaaaaaagacatattttccgggagcgtggaatagaataataaagttgacagaaagaataagagagaagtagtcagaaacgaaaaagaagcaaaaaggaggtatgtaaaatgttgacaaagcgaagacagaatccacaggaagtgatttcaatcgaagaatatttgagcaaacgtcagcagatcagggaacaggaagaaagaggaaagcacaatccgcaaagcgtgatagaaaaaggctctgcactgatgctggcagagctttatatataagatagtaggtttttatttttcttcttgatcgtgatcatcatcttttttggaaagacgatgaaagagcattgcggcatataaaaatacggggagtatgattgtagctgcaatggatgcctttaagagatcaagagactgagaacgatcaatgaaagcgaagagcagtgtgctcgcatagagcgcacagagcaagatcacacctgccaatgcaaagatccgtttgaattttttcatagtaggacactccgtttctaaacaagatatttgctctattatataggaaaacacacgaaaaagcaaatgaagaaaagaaataagcataagaaagtattttctgtgaatttgacaagtaagaggaaaagcaggcaaatatcgaaaaatgtttgaaaagagaaaagaaatagtatataataggacgtacgaaatcacatacaaaggagtattggtagaaatgagtttattagaacaatggagagctactgcgtattcgcaggagatggataagacacagttacagaagttttggacgacatattttcagattgagagaggaatctatgagcagcttctctctaatccagatgaggaagtcagaggaactgtaaaggaacttgcagagaaatatcaggtagaagtatttactatggtaggattcttagatggaatcaatgaaagtctgaaagtagaaaacccgatcgagacaatggaagaagatacgatcgtgaacttaaactttgataaagaaaaattatataagaacatggtcgatgcaaaagcagactggttatatgaacttccacagtgggacgagatcttcacaaaagagaaacaaaaggagctttacagagaacaaaaagcatccggtactattcgcagagagaagaagatcggaagaaatgatccatgtccatgcggaagtggtaagaagtataaaaagtgctgtggaaaataacagcttgggtaaagaggtgagaagatgcatacaggatttatcgtcataggaattttagcgattgtctattatctttttatctgctattatacaagaaaatggaattctacatttgctggattctggatagtgtttgcggtgttcaatttcctattggcagcaattgtacattttagcccgcgatggcttcagtacatattgcttacattgaattttatcgcctattttgtattctttgcagtacaggtgatcatctgctctgcaatgcttacactgccgcctaagaagctggatgtgatcattgtgctgggcgcacaggtgagaggaaagaagattaccaattctttgaagagacgactggatagaggaatagcatatttgaaagagaatccggagacacgagtggtcgtatctggtggtcaggggaagggagaagatgtgacagaagcgtttgcgatggcacagtatcttgtttcacacggtgttgctgaggaacagatctctctggaggagaagtcgagaaatacttatgaaaacctgaaatacagtgcgctgcttgtagacagtatggacgaccggatcggaattgtatccaacaattttcatatttatcggtcgctgttgcttggaagacagattggctatacaagattgtatggaattgcagcaggatgtaatccaattttatttttaaactatatggtgagagagtttttcgcagtgatgcgaatgtatcttacaaaagaatagagagaatacgtagatgagacgagtaggatgtggaagattacagagagagaagtcttgtgctggaaacttcttattacagaagcatctgaaaactacctcggagtggctgaaaacagcccggtgattccgttatcatcaagaaagtggttctggcaaaagccagttcaatcagggtggaaccgcgagtaaatactcgtcccttgcagtatcaatgtctgtgctgcaagggatttttctgtttggcagaagaacggaaaacacgatcaataggagaaacaaaaacaataaaaatagaaaaggagaagaaaaaatgaaaattacattaaaagatggttctgtcaaagaatacagtgaagcaaagtctgtatatgagattgcagcagatatcagtgaagggcttgcaagaatggcgacagcaggagaagtggacggagaagtgatcgatcttcgcacaaagatcgaccaggattgtgaactgacaattcatacattccagagtccggagggagcacatgcgttccgccacacaacatctcatattcttgcacaggcagtaaaaagactgttcccggatacaaaacttgcaatcggaccggcaattgatgacggtttctactatgattttgacagagaagttccgtttacaacagaagatctggaaacaatcgaaaaagagatgaagaaaattgtcaaagaagatctgaaaattgagcagtttacacttccgagggaagaggcgattgcattaatgaaagaaaaagaagagccgtataaggtggagctgattgaagatctgccggaagatgcagtgatttctttctacaagcagggagaatttacagatctctgtgcaggaccacacttactcagcacaaaatctgtcaaggcatttaagctgacaagtcttgctggtgcttactggagaggaagcgagaaaaataagatgctcacaagaatttacggaacatcttttacaaaaaaagcagatcttgatgagtatcttgcaaaaattgaggaagcaaagaagcgcgaccacagaaaattaggaaaagaactgggactgtttacaatcttagaggaaggaccgggattccctattttccttccgaagggaatgatcttaaaaaatacactgatcgattactggagagaagtgcatacacgtgcaggttatgtagagatttctacaccgatcatgttaaatagacaactttgggagacatctggacattgggcacattacaaagaaaatatgtatacaacagtgatcgatgaggaagattttgcaatcaaaccaatgaactgtccgggaggaatccttgtttataagacagaaccacactcttacagagatcttccactccgtatgggagaacttggaacagtacaccgccatgaaaaatcaggtgcactccacggtctgatgagagttagaagcttcacacaggatgatgcacatattttcatgacaagagagcagatcaaagatgagatcaaaggggttgcaagactgattgatgaagtatatagtctgttcggatttaaataccatgtagaattatctacaaaaccagaagacagcatgggaagccaggaagactgggatatcgcaacagatgcgctccgctctgcactggatgagctgcagcttccatatgtgatcaatgaaggagatggggcattctacggaccgaagattgatttccatctggaagatacacttggaagaacatggcagtgtggaacaatccagttagacttccagcttccgcttcgttttgagatggaatatattgcggcagatggcgagaaacacagaccgatcatggtacaccgtgtggtatttggatctatcgaacgtttcattggtattctgatcgagcattttgctggagcattcccgacatggcttgcaccggaacaggtaaaagtacttccgatctccgaaaaatatcatgagtatgcaaatgaagttgcagcaaaactcaaagaagcaaagatccgttgctctgtagatgaacgttcagagaaaatcggatataagatccgtgatgcgcgtctgaataagattccgtacatgctcgttgtcggagcaaaagagcaagaagaaggagtggtatctgtcagaagccgtttccttggagatgaaggacagagaagcctggatacatttattgcggagatcacagaggagattaagaacagaacaattcggaaagtagaattggaagaaggaaaataaatctgcgagagcacacaaagtctgtaaaaaaatcagaaaagaagtataggaatgtttttggcggaaacactatgtttgtgaacagtaatcaaacaaggaggtagcaacatgccagaattaaaatgtaccgtacagacttgtgtacacaatcagcaatttttatgtaatctggataagattgaagtaggcggaaacaaagcaaagcgctcagaggagacttgctgcgacagctttcaggaaagaaaaggagacagttattccaatgtgacggggaccgcttctccgacaagcacgatcgactgtaaggcgacagactgtcagtataatgagtcctgcaaatgtcatgccggaaagatcagtgtggaaggaagcaatgcatgccactgtcaggagacagaatgtgctacgttctgtgctgtctgcgaatagagtgaaaaaataggaagaaaaggcatcgtcagatacaagcgatctggcggtgccttttcatagtgtgggcgtattgacgcgtggtatggcagagggtataatgatttcatatgaaaaaaaggaaaggagcgggaaaatggaagaacaggaaaaaaagcaggattcccgggaagagagaacagataacagtccttatcataagcaaccacggctgacaaagagaaccacttctaaattgcagcaacatttaaacagggggatgacagcattcctcgtcgttgcagccagcattgtgttttattttgcatttttaagatttggtcatatttccggtgttcttggaaaaatctttcagattttgaaaccaatcatctatgggtttgttttggcatatttgttgaatccactcatgaagatggtagaaaattttattgtgaagctgttaaagggaaagataaaaaaagaggagagattgaaaaagtttgcgagaggtgtggggatttttaccgcactgctttttgcaggggcattgattgttgcgttatgcaatatgattttgccggagttatatcgaagcattcgaaatatggtttacactgtgccggaacagctcaatgaatggatggaacggttaagtgagatggaatttgacgattctacccttgcgctgatcacaaaaaatgtgctcacagaaacaaccgcgttttttgaaaactggattcgaagtgatctcctaagacagatcaatatatggatttccggtctgactgaaggcgtcatcagcgttgtcaatgaactgatgaatatcgtgatcggaatcattgtttctgtgtatgtattgtttagcaaagaaacatttgcaggacagtcacggaaagtagtatatgcagtgctcaaaccagaaaaggcaaatctggtattacatattacgagaaaatcaaatgagatcttcggtggatttatcattggaaagatcattgattctgcaattatcggggtgctgtgtttcataggattaagcattcttgatatgccgtatactcttttggtcagtgtgatcgtcggtgtgacaaatgtgattccgttttttggaccgtacattggtgcgattccaagtgcgatactgcttttgttgacagatccgatcaaaggactttactttttggtgttcattatcttcttgcagcagttggatggaaatatcatcgggccgaagattcttggagattctaccggactgtctgcgttctgggtagtcttttcgattttacttggaggaggactgttcggatttgccggtatgattatgggagtgccaacatttgcagtgatctattatctgttccaaatgtttatcaaccagaatctggagaaaaagcatttgccgacagattctgctgtctacgatgatactagctatgtagatgcagaatccggagagtttattcatggaaacaacgatgagcagaatatcggagaagcacaggtgcgaggaaaagaagattgtgaaaaagaggaggaaaagtaaagatgccgattcgggtacaaaatgaacttcctgccaaggaaatattggagcgggaaaatatatttgttatggatgaatatcgggcggtacatcaggacatccgtccgatccaaattggacttttgaatctgatgccgctgaagcaagacacagaacttcagatccttcgctctatgtccaatacaccgcttcaggttgatgtgacatttgtcaacgtttccagccatgaatcaaaaaataccgccaccagtcatctaaatcagttctacgttccgtttgaagaaatcaaggagaaaaaatttgacggctttatcattacgggagcgccggtagaacagattgaatttgaggaagtggattactgggatgaactaaaagagattatggagtggacgaaaacacatgtgacatccacgtttcatatttgttggggagcgcaggctggactttattatcattatggattggagaaggtgcagctggagcaaaaactattcgggatttttgaacatcgcgtgaaaaatcgaaaaattccgcttgtgagagggttcgatgattattttatggctccgcattcccgacatacgactatcccaaaagatcaaatcgaatcggatgagcgccttacgattttggcagagtctgaggaggcgggagttttccttgtgatggcagaggatggccgacagatttttgtgatgggacatcccgaatatgatcggatgacgctccacacagagtatatgagagataaagaaaagggtcttccgatagcgcttcctaaaaattattatccggaagatgactgtgagagaagaccggtgttatcctggcggtcacatgccaatgatctgtatacaaactggctgaattattatgtgtaccagattacaccatatgatctgatggggacaccattttaatagaaatgtgacacggaagagtatgagaatagattttggaggaggggaatgtcttgaaacgtgtacaattattagaaaagttacatatgaatgtacctgagagtgcaactatttccttgataattgatacagatgcaaaaaatgaggccgacgaccaatatgcaattatacatcacctacttagtccgattatagatgtaaaaggaattgttgctacacattttgagcagaagaatttgtatcaagatgggtctatggaaaaatcttatcaagaagtagtgaaacttcttgaattggcagagatagaagatgtgccggcacttcgaggaagtgaaatgccggtgaaagataatgtagatggagtttcatctgaaggtgtccggtttattattgaagaagctaggaaacttaatgaaaataaactttatattgcgatgatgggagcaatgacggatattgcggaagcattaaaaatagctcctgacattgcaaaaaatattgttgtaatatggaatggtgggggaccatatccaaaaggaagacctgaatttaatgttatgcaggatccagatgctgtacgaattgtgttagaaagtgatgcagaagtgtggcagattccacaaaatgtatatagtgcatttgaagtgacgattgcagaattatcccgccgtgttcgaccatgtggtaaaataggagcctatttatatgaacaacttttagaagaaaatagtattgcatttaatacggagttcctgttgcggacaggtgaaaattggattttgggtgataattcaacaatcgcagtatttcttatgaaccggtttagggataattgggagttgcgaaaagctccaatagtaaaagaagatttaacttatgaagataatccaaatgggaaaatgatccgggtatataaaatgttggatgtaagaatggttatagaagatttatttagtaaacttgaactggtatatgggaaatagatgtatagtttccgttaagtttcttttgggagataaagcaaaaatgttagaaaaggagaactattatgttagaaacaggtattcaggcaccagaatttacgcttccagatcaaaatggagagatgcatagtttaaaagattatagagggaaaaaggttattttgtatttttacccaagagataatacacctggctgcacaaaacaggcatgtggctatagtgaacgatatccgcagtttgaagaaaaaggcgcagttgtgcttggaatcagcaaggacagcattgcatctcataagcgatttgaagaaaaacaagggttaacatttacgattttgtcagataccgaattagaagctataaaagcttatgatgtgtggaaagaaaaaaagaattatggaaaagtttccatgggagtggtcagaacaacgtatcttattgatgaagaaggcgtgatcattcgggcaaatgataagatgaaagcagcagaagatccggagaaaatgctggaaatcttgtaagagtagttacataaagagtctacgcaatgcatatcaaataatgttatgaaaaaagagaactggaagggagagtctgaggggactccttctaagttctctttttgttttggattaaaaacttctgattgtttcttcgttgagccgtttgacaatttccacggcgagttttaccgcattttcgtaatcttccagtgtgcagattccatgatgactgtggatataacggacaggaatgccaatcacgatggttgggacaccgtggcgggaagcatggatgtattttccgtttgtaccgccgccgctgcggacagattcctgcactggaataccgagttcctcaccaagatccagagcaaaccgctggaaacgaggatttgtgatcattgaacaatcaaagtggcgaagcattggaccttttcggagtgctgcctggatcagatagtcaggagaaaaggtatcatctgccggacatccctcaaatacaatgcacacgtcggcatcgatgttatcgacagcagccatagagcctctttctcccacctcctcttgcacggtcagagttgccgctacatctacatccagcatttccgtacttaactggttcagtgtttcaatcagagcggcacatccaatccggcagtcaaatgcttttcccataaacaaatcgtgcgtttcatcataggtgcatgtcacgtccgggacaaccggagcagccatacggatctgaaagttttctttcaaatcctgcgcgcttacagcaccgacatcgatagcgagatctgaaagtatccgcccttgatttttctctgcagcactgacaaaatgaggaggtttgcttgtaatgatcccgggaatatactctcctttggcagtctgcacgcgtactttatttgatgggagactggaaatatcacttcctccgattgtgaggaaattcatagtaccattgggtttgatcgcctgtacgatatatccgacttcatcgctgtgtgcatcgatccagaccttacaaggttgcttacggttatttttcaggctcatgtaagtatttcttaaggagtcgattgttacattgcagtatgcctcggtctcttttcggccaagttctgcaacttcatcctcaaagccagatacgccatttgcattgctcagtgcctggatgagacatatgttttcttcttttgttctcatagtgaacccctctttctctattaaatatcaaaatgtttattcttgatcaaaaatgcaaaagaagcaagtgcgcaggcgccgattgctccgcgataatcatcgaattgagtaatttcaatttcgatattccgtttggtcgggataaaatttaattgttcctgaatcagagcggtcagctgattttggaaggaatcgtgccggaacagcctgctgtttaagtatattttatcgatgtcttgaatgatcagagtgtttgcgacggatacacttaaaaggcggataccgaggtcgatctgcgtgttaaaataaggatcgccgagttcataggctttgatcactgtatcgatgtcgattgcctccgcgttatctacaaggcttctgaaaatgctggaagaagactggtgaaacagaaatctcgcatttttgatcagccatgattcggaaatataagtctgaaggcatccgcgtttgccgcattcgcagagagggccattgatatctacaaccgtgtgaccgacttcaccaatataatagttattttttacccccaactgctctgcattgaaaaaggaacaaaacagaccatgaccgatatgatagaacaaaaacttgtccggagaatttttggcttgaaacagatattctccaagagacatacattctacattgttgttgacgatgaatggaaatggaaaatatactgaaatttcttttaaattaaacgctttccaaagaggattgttggagatgatcgtctgtgagtcataatcaaaatgtcccggaatggcaatccccgctccgaatattttcgaaggatccacttttttgagcagcagattcaactgtagaacaatttctgaattgatattattgacatcgtaggacgaaaaagtttcgcaagcttctgtgatcacctttccagagagatctgttatcacgaaaaagattcctctcatatttagttcaatcccgatcagatatcctgcagaagcatttaaagtaagaagcttccgctttctgccggagccgggtgcgttgctgatctcgtcaccgatttcgacgattaaattctggcttttaaggtctccggtaatctctgtcatcaacgcgggagtcagaccggttgcgttagcgatttcgattcgtgaggttttctgttttcggtaaataaattccaaaacagaagagacatgctgactgtaaacatctgatttctttttatacataaataaaatacaatcctttctttatcgaaaataaataagtaagataaaatgactgtcatatcgatgtgatttgtttctattttatcacgcaaaggaagtttttgccataagaaatcattgtaatctaaaaaagagcggataaaaatgctaatttcgtggtaaattagacaaaaaaagaattttatttataaaaaataaaataaaactttacaaatgctgtcgaatggtataatatatatttataaaaaataaataaaaacggaggttgctatgaatcggattttagcatttttagagggaaaactcgctccgctcggagagcggattggaaaacagagacatttaaaagctctgagagagggaattatgatggcaatgccattggtattattgggatcattctttgttttgataaaagatttcccgatacaggcatggactgcatggctgcattcgcattggaatctggatgttcttttaaacacaatggcaaataactcattcggcttgatggcgcttgtaacagcatttggaatcgcgtatcgtctgtcagaatcgtatggaactgacggtccgtcagcaggtgtaatttcgttgggagcatttcttctgatgacaccgccactggcagcagaagacggagcagttggaattccttatggaatgttaggtggaaaaggaatttttgcagcaattgttgtagctatgatctcagcggaaatttatcgctggtttatccaaaagaatattgcgattaaaatgccggcaggtgttccggatgtagtaagtaaatcattttctgcattgattccgggaatcgtaattttaacattttttgcagttgtattaaaagtaattgaagcgacaggacttggaagtttaaatgcaattctttctattgtagtaggaaaaccattaggattgattgcaagtacattgccgggaacattcgttgcagtattattaaattctctgttctggttctgtggtgtcaatggtggacaggtagtcggagcagttatgaatcctctttggatccagtatgcagatgcaaaccgtatcgctcaggcagcaggagaagttcttccaaatatcgtaacagcgccgtttatggatctgtttgtgtatattggagggggcggtgcgacaatcggtctggcactttgcctgatgtttttcagcaagagcaaagaatacaaaacacttggaaaagtatctggtattccagcattatttaatattaacacagcaattttatttaccttcccaacagtattaaacccaatcatgttgattccgtttgtactgacaccagttatcaatgcagtaattacatatgtagcaatgctgacaaaccttgttccttatacaacaggtgtaacacttccttggacaacaccaccgatcatcggaggatttttagcgacaggaagctggagaggtgcggtattacagatcgtgcttgtgattgtgtcctttgttatctattacccgttcttcaaagcggcagataagagaaacttattgaaagaaaaagaaggtgcaaactaatgagtataaaaatttggtatcagacagaagagcaggaatttctgcatgcagagatgcagcattattttgaggcagtattacaaatgcaggcagaaaaagcatctgagcaagatgcagatctgaaagtgatcgtggaaaaagaagatacagatatggaccatatctgtatcgaactccacggaggaaagggaaagattcaggcagattctcaagtgggagtactgattgccgtgtatcgtcttttccatgaatttggcgtgagatatcttcgtccgggcagaaagaatgaatttttccaagttctttccgaaaacgactgggcagaaaaggaaatctctattgaggagacagcaagtttccgacacagaggagtctgcattgaaggagcagattcttatgagaatctgagagattttatcgactggcttccgaagattggaatgaatacgttctttatccagtttgaaaatccatactcattctttaagagatggtatgaacatgaatttaatccatatgcagaaaaagaaccgttcaatacagaaattgctcaggagatgagtgatcggatcgatcaggagatgaagatcagaggaattgtgcatcatcgtgtaggtcatggatggactggggaagtgctcggatattcttcaaagtatggatgggaatcaggtcttacccttccggaagagaaaaaacatcttgtggcagaattaaatggaaaaagagagctgtttgatacagcgccgatcttgacaagtcttgactttgcaaatccggaagtcggaaacaagatggtagaactgatcgtcaattatgcaaaagaaagaagagatgtagattatctgcatgtatggctttccgatgcaagaaataatatctgtgaatgtgagcactgtcaaaaagatcttccatcagatcagtatgttcgcattttaaatcagctggatgaagcgctgacgaaagaaggtctggatacaaagatttgtttcttgttgtaccatgaactgttgtttgcgccagagaaagaaaaactcaaaaatccagagagatttacaatgatgtttgcgccgatcacgcgtacatttgaaatgagttatgaagatgtcaattacgaaacagatgttccggaaccgaaggcatatgtaagaaataagatcgtgcttccaaattcattagaagagaatctttcttatctctttgcatggaagaagatgtttgacggagacagcttcgtatatgattatccgcttggaagagcacattatggagaccttggctatatgaagatcagtcatgtgatctaccgcgatattcatttcctgaaaaacttgcagttaaacggatatatcagctgtcaggaacttcgggcaggatttccgcataacttcccgaactatgttatgggacagatgctctggaacaatacacgggattacgaagagctcaaggaagaatacttcagtagcatgtacggagaaaattggaaagaagtgatcacttatctggaaaatctttctgcatattcttcctgcgattatttcaacgcaatcggtgagagattaaatccagttctgtcagcaagatatgaagtgtgtgtaaatctcgcagaggagatgcttccggtgatcgaggcaaatacagctaaaagagatggtcttcaaaagcaggagtggaaacagttaggataccacagagaatatgtgatgaagatggcagaggcacttcgtttgatcagtgcaggaaagcacacagaagcacagcgtatgtggagagatgtacttgacttcattcgcagaaatgaaatggcattccaacaaaatctggatgtgtaccgtgttattgaggtagccaagaattatgcaggattcaagttgtaaaaggataaaagtccttttgtgataaggtgagcgaatatgaaaagagaccataaaaaaatcattgtaacatttttgctgccactactttttctgtatgcagtatttcagttatatccattgctcctgaatctgttttattccatgttgaattggaatggaattacaaaaacagcaaattttgtagggctggacaattatgtagaagtcctgggagatggtttgttttggaacgcagtgaaaaacagtgtattgtatgcagtggcaggaactttttttcaggtaacagtatcgttcttccttgcttatcttgtagagtataatacatttaaaaagaaaaaaatggtccgcctagtatttatcatgccaatcgtagcaacttctgctacgattggtattctgatgaaaagtattttcagctatgatggatttgtcaatacggtcatcagcggtgttggtcttgagaagattgaatggctgacagaacctaagtgggcatttttaatgattatccttgtatctgtatggaaagagacagggacattatttatttactggatggcaggatttcagatggtatctccggcagtaattgaagcatctaaggtagatggagccagtgaaccggcgtttgtccgctacattttgatcccgacaatgaagccggtcatctttacggttacttccgtggcatttttaaatgccttgaaaatgtttgatatcatacagacattgacgagtggaggcccttatttttcgacagatatgatatcgacttatatttacaggacagcattttccagttcgtttggagcgccgaggcttagctatgcaagtgcggcagtcgtgatgtgtcttgtatttttgattttgtgcagtggattgatacgattctttcaaaagaagtggaaagaaggaaaagaggcatgttaaagaaaattttattatttgtaagcacagcaatctggcttgcaccattcctgctgatgttgttgatcgcgttcagcagtaaaaatacgaattcctttttggagttgtttgcagacaatcgtgctacctttcaaaattttcaaaatgcatgggagcaggcggaattttcccgatattttctgaacacggtgattgtgacggttgtttcggttgttgtgattcttgcagttacagcgcttgcgggatatattatgggttgttttgagttccgggcaaaaaagattatttatacggtgatgatgatttctatgggaatcccgacaatcttttttacaatcccggtgtatcagattttgcggatgctccattgcgagagttctttgattgggctgattttggcagaagtcggtggtggacatgtgatttttattttgttgttttcaaaattctttcagtcgatcccaaaagcgctggaagaatctgcagtgctggaaggggcaagtgaatttgatgtgtttttccgaatcatgtttccgcttgcgggaccggtgatcggaaccgtagtgatcacgcaatcaatctggacatggaactctttcctgtatccacttattttgtctgtgaatcagccgaaaatccgtacactttctgtcggtctgtattcttttcagggagaaaatattgtggagtggggaagtattgcagcgggagcttgtattaccattcttccgatgctattgttgtttgtaacattccaaaaatattttatccagggaatttcaggggcagtcaaagaatagcggaaagaaagggatgccatatgagaaaaagaattgcagtgctgttggcaggagcattgataggtatgactggctgtggtggagtaaaggttgtaagtccggaagcaggcaacagcagtcagaaagcagagtttgaaaaaattaagacaccggaagatgaaaaagtcgtattgaatatcgtcgactggagtgacagtacgaaagatgccagagaaaaattgaatgagcagtttatgaaggatcatccaaatgtcactgtaaattatacgacgctgacacaggcgcagtttaatgaaacgatgctgtccggaattcgggcaggagatgctccggatttatttccattaccgtctacggttacgttttccacggcagtcagtgagggatggtttcttccgatgaatctatatttggaagaagatttctttgcgcagatccagccggaatttctatgtgaaaatgttacaatgaaaggggaagatgtctatcttcttccagaagcggtagacattccgagtgcacttttattttataaccgggctctcttggaagaagtgggggcagagattgatccggagaaagtaacctgggaggaatttcgacaagtctgcgagcaggttacggaaaatggagatggcaagtattacggcatggttgcaagcggtgcacagaaaaaccgtatggatattgagcttcgtgcattttcagaagtaggaggagcaaaattaggaccggcaggacaagtatttttgcaggaagagcagacaacatttgcagatcctgaagtggttcaagcgtttgacctctatcaagagttgtatgaaaaaggatgttttcatccggatacagcatcgttgacagcgccggaggcaagaaagctgtttggagaaggcaaggcagcatttcttgtgcagggagcatggtgcattccagtttgggagaaggataatccggatttggatttcggagtgatgaaagttccggtgaatgaaaaacttccggatgggaaactactgcgtccatttacaaagggatggatgggaatttcagcgaacagtaaacacccggatattgcggcagaatatttaaaatatctctattcttatgaatatcaaaaaaaactgatggcgcagggaggatttgtgtctgtgcgaggagatctcggagaaaaagatattgagaatgaacatatgagacgttattatcaatatgcgatggaacagagcattgctgttccgaatccggtggcagaaaacggcaatatcgagctggtttacagtatgatccagccggttgttccggattttggtgacattgcctcttctattttttctggaaaagagatttacaaaaaagaattaaaaaattacgcgagtcagatgcaggagaacctggaacgatctgtagaaaccgtgaagaagcagaaggatatctctttgtcagattttaattataaggacggaaggtagagaagtttccttttggaattgctttacacagaaaaataaaaatgttttgaaaagatgtaaaaagtattgacaaatttatatttctgtaataaattaataaaaaataattttttaaaccgttgagaaagaggagtaggttatcaaacgacatcccagagagtggcaggaggtgcgattgccatatgaagttgatgattgaatggactttcgagggcggcctgaaatcagtaggagagtatggtacgtcgggaaccgaacccgttatcaatcaggagtgtatgttagtacatgagaaagaggacagtacgtgtcaatttgagtggtaccgcgataataatacctattattaccgtctcaagcaagagcttgaggcggtttttttcgtgttggcaaggatcgtgagcatttttccaggaaggcgctcgttgtgcttgcacaaaagagagcattcctggaaaaatattcgcgggctgcccgcgactgagaggcgaagcctcgaagtgctcacgatcccattgcgaaatgtgaagtctcgaaggaatcacgatccgaattgtctaatctttgctaacatcatagttatctgcctggcaagtggatatcagcataattaaaaaaggaaaaggagcagagaaagatgatgagaagaatgagtaaaaaggtaggaaaattaacaggaagtctggcagctgtgctagcgattgtagcaatcacaggctgtggaagcaagcgggaagcaaagaacgagcaaggagagcaaatctatcgtatcggtatctcacagtttgcggagcatgcctctcttgataactgcagggaagggtttttggaaggattaaaagaagaagggttggaagaagggaaaaatctaaaaatcgaagtgaaaaatgcagcggcggatatgggcactgcaagtcagattgcggatcggtttgtggcagatcagatggatctgatctgtgcaatcgcaaccccaagtgcacagactgcatttaatgcggcgatggatacagagattccagtcatctatacggcggtgacagatccagaaacggcagagttggcaggaaaagataaaaagccggcaggggaagtgaccgggacaagtgacagacttccgatcaaggatcagcttgaaatgattcgtcagattcttccagaagcgaaaaaaatcgggattctctatacgacaagcgaagtaaattctttgtccgcaattcgagtatatgaaaactatgcagaagattatggatttgagattgtgacagcaggtgtcagcaatacatcggaaattgcgatggcagcagaagcattagtaggaaaggtagattgtctgaccaatctgacagataacacggtagtaaattcccttccgacgattcttgaacgagcaaaagaagcagagattccagtatttggaagcgaaattgagcaggtcaagcttggatgtctggcggcagaaggacttgactatgtggaacttggaaagcagactgggaaaatggcagcaaagatactgacaggagaggcaaaggcatcggaattggaatatgaagagatttcaggaggaaatctttatttgaatactgcagtggcagaacaactggggatctcttttggagaagaacttttggaaaacgctgagatatgcgaataaaggatatgaggaaaggatggcaggaaaatgagcttgatcataacaacaatggagcaggggttaatctatggaatacttgctcttggtgtctatattacttataaaatactggattttccagacttaactgtagatggaagttttccgctcggcggagcggtaggagctgcgctgatcacaaagggaatgtccccatttctggcactgcttctggcatttctggcaggagcgctggcaggaatgctcactggattgattcatgtgaaaggaaaggtcagagatcttctggccgggatcattatgatgacagctctgtggacggtaaacttacggattgccgggacggcaaatgtcccactgttttctcagaaaaccatttttaaaaatgatctgatcgataggatgtttccgggaacacttaaaaactatgccacactggcactgatctttgttattgcggttggggcaaaattattgttggatctttatttgggaacaaagtcaggatttcttctgcgggcggcaggtgacaatgataagttagtcacttctcttgcaaaagatgcaggaaatgtaaaaatcattggacttgcgattgccaatggtcttgtggcacttgcgggatgtgtattctgtcaggaggagagggtttttgaaatttccatgggaaccggagcaatggtgatcggacttgcaagtgtgatcatcgggacgagtctgtttcggaagcttcctttttttaagacaacaaccgctgtctttgccggggcggtgatttacaagttgtgtgtcggtattgcaattaaaaactttgaaccaagagacatgaaattgatcacagcagtgctgtttcttgtgattttgttgatcagtacggagagaaaaaggaaggtgaaaggaaatgcttgaattaaatcatatttataaatactataatcccgggacggttcatgaaatgtgtttatttgaagattttggaatgaaaatagagcggggggattttgtttctgtgattggaagtaatgggtcagggaaaacctctcttctaaatctgatctgtgggagtatcctgccggaagcagggcaaatctgcatgaacgggaaagacatcacaaaggaaaaggagtataggagaaatcagaagatcggaagagtgtatcagaatcctgcatttggtacttgcccggggatgacgattcttgaaaacatggcgatagcggatcacaaaggaaaacgttatggatttgcaagaggaatcaacaaaaaacagatttcctattatcgggaactattatcttccttaagacttggtctggaagaaaagttggagacaaaagtgggagcattgtccggcggacaaagacaggcaatggctcttttgatggctactatgacaccggtggatcttctgattctcgatgaacatacagcggcgctggatccaaagacggcagagcggatcatggagctgacagatgaaattgtgaaaaagaaacaattgacagcgatcatggtgacacacaatcttcgctatgctgtagagtatgggaatcggctcttgatgatgcatcagggagagatcataatggatcggtcaggcaaagaaaagcagcagacaagtgtggaagaaattttaaagttgtttaatgaaatcagcattgagtgcggcaactaaaatagaagagagaaaataaggatggaacagcaatgtccatccttatttttcacaaaatttagaagaacgaaaacgaagatttttgtataatattttcgcgcagttcttgttgacggtgcttgcaggaagtggtaatattgttcgtgcagacacattatctagtttgctaaaagataataaaacactaaatatagatgaaataatggggaaaggaagcaagtgtagtatggtgaaagtaatcaagaaagacgggacttcagaagagtttaatgtacagaaagtagtagtcgcagtcaataaatcagcttatcgtgcattgatccaatttacagatgcagagcttgaatttatctgtaaatttgtggaagagaaagtaagagatatgggagtggaagaagtccggattgccgagatgcacaacatcgtagaaggtgcattggagaaagtgaatccgcttgtggcaaagagctatcgtgattaccgcaactataagcaggactttgtgcagatgcttgacgaggtgtacaaaaagagtcagtcaattatgtacatcggtgataaggagaacagtaatacagacagtgcgctcgtatctacaaagcgcagtctgattttcaatgaactgaataaggaactttacaagaagtttttcctgacaacagaagagattcaggcatgcagagatggatacatctatatccacgacatgtccgcgagacgcgatacaatgaactgctgtctgttcgatgtaaagaacgtgctgagcgggggatttgagatgggaaatctctggtacaatgagccgaagacactggatacagcattcgatgtgatcggagatattgttctaagtgcagcaagccagcagtatggtggattcactgtgccaagtgtagatgatatcttagagccgtttgcagagaaatcattccataaccatgtggagaaatatctgggacttggaatcgagcgggagaaggcagaagaggtcgcatggaaagatctggaaaaagagatggagcagggattccaggggtgggaatacaaatttaactccgtatcttccagcagaggagattatccgtttattacagtgacagcaggaaccggaagaagccgttttgcaaagcttgtcacgatcacgatgctgaaagtcagaatgaacggacagggaaaagaaggtcataaaaagccggtattgttcccgaaaatcgtattcctctatgatgagaacctgcatggaccgggaaaagaactggaagatgtatttgaagcaggaatcgaatgttcaagaaagacaatgtatccggactggctgagtctgactggaaaaggctacatcgcaagtatgtataagcagtatggtaaaatcatcagcccgatgggatgccgtgcatttttatccccatggtacgaaaagggtggtatgtatccaaaagatgagacagatacgccggtatttgtcggaagatttaacattggtgcagtaagtcttcacttgccaatgatctatgcaaaggcaaaacaagagaacaaagatttctatgaagtacttgattactacttaaatctgattcggaagcttcatattcgtacatatgagtatctcggggagatgaaagcatcgacaaatccgcttgcatactgtgaaggtggattttacggtggaaatcttggtctgcacgacaagatcaagcctctcttgaaatcagcgactgcttcctttgggatcacagcattcaatgagcttcagcagcttcataataaaaaatcacttgtggaagacggcgcatttgcactggaagtattagagtacatcaacaagcgtgtcaacgaatttaaagaagaagatggacatctgtatgcaatctatgcgacaccggcagaaaatctctgcgggcttcaggtaaagcagttccgcaagaaatacggaatcgtagaaaacgtatctgaccgtgaatatgtcagcaatggattccactgtcatgtgacagaagacatcacaccgattgaaaagcaggatctggagtatcgtttctgggaactcagcaacggaggaaaaatccagtatgtgaaatatccgatcaactacaataaagaagcaatcaaagcccttgtgcgccgcgcgatggatatggggctttatgaaggggtcaatctgtctctggcgtactgcgacgattgcggacacgaagaacttgcgatggatgtctgcccggtatgcggaagcaaaaatctgacgaagatcgaccggatgaatggatacctttcttattcaagagtcaaaggagatacacgtctgaacgatgcaaagatggcggaaatcgcagaaaggaagagtatgtaagatgcgatatcacaacataacaaaagacgatatgctaaacggggatggtcttcgtgtcgtattgtgggtggcaggttgctctcactgctgcaaagaatgccacaacccgatcacatgggatccgaacgggggattggattttgatcaggcagcaaaagaagagatttttgaggaactttccaaagattatatcagtggaatcacatttagcggaggagatccgcttcatgtcagaaatgcttatgatgtcaaagaactggcaaaagaaatccgagagaaatttccacaaaagacaatctggctttacacaggttctctctgggaggaaattaaaaacacggagattgtgaaatatctcgatgtgcttgtagatggcgaattcgagtgtgataaaaaagatgtaagtcttcactggaagggaagcgcaaatcagagagtcatcgatgtacaggagtctcttcgccaagagaaagtgatcttgcacgattcctaaaatttcatttttgtcggcgaaaatgtaagcttgtccggcagaaagactgggaaagaaaacgatagattagccgggacttcttatgattttcagcatggaggaaccggctatctgtttcggaatacagaaacataaagaagaaacaacaagagagaaaatagaaacgggagaaaacaaatgaaacgaattgcaaaatttcagaaagtaagttacgagcagtttacagagggatggatcgatacttttggtgccaccaatgcagaagaaatcaagacgatttacgatcatatcaaacttccaaagcgtgctacttcaggatcggcaggatatgatttctatgcaccggtgacattgacactgaaaccaggggaaactgtgaaagttcctacaggaatccgtgtggagatggaagaaaattgggttctaaaatgttatccgagaagcggtcttggattcaaatatcgtctgcaattaaataatacggttggaattattgacagcgattacttttactctgataatgaggggcatattttcgcaaagatcacaaatgatacaaacgaaaataaaaccgttgagattccagaaggaacaggatttatgcagggaatctttgtggaatatggaatcacagttgacgatgatgtgacaagtgtgagaaacggtggtttcggaagtacgacatagtcatagaaaatgcgaaaactgtaaaaaaagtatgataaagtacttgcaatccatagatttgctatgctatacttaaacggtcgtaaaaaacacgcatatggtaatctctgccggtgccaatattcttcaacggattctgaataggatttttatctgtatctcatttgagagaaagatgacagtcagataagatcaggaccgcattatatatagaagaaacggttgcagagtacaggaaatatgcggaagagtaaaaaccaatggaggaaaaatcatgagcgttatttcaatgaaacagttattagaagcaggtgttcactttggacatcagacaagaagatggaaccctaaaatggcagagtacatctacacagagagaaacggaatctacattatcgacttacagaaatcagttggaaaagtagatgaagcttacaaagcaatctctgacatcgcagcagaaggaggaacaatccttttcgttggaacaaagaaacaggcacaggatgcaatcaaatctgaagcagaacgttgcggaatgttctatgtaaacgagagatggttaggtggaatgctcacaaacttcaagacaatccagagcagaatcgcacgcttaaaagatatcgaaagaatggcagaagacggaacattcgacgtattacctaagaaagaagttatcgcaatcaaaaaagagtgggagaaacttgaaaagaacttaggcggaatcaaagatatgaagaaagctccagatgcaatctttatcgtagaccctaagaaagaaagaatctgtgttcaggaagcacacacacttggaattccgttgatcggtatcgcagatacaaactgtgatccagaagaattagactatgtaattccaggaaacgatgatgcaatcagagcagttaagttaatcgttgctaaaatggcagacgctgtaatcgaagcaaaccagggtgttacaggagaagaagaaatttttgaagaagtaacagaagaagcagctgaagaagtaacagaagaagcttaagattggaactaaatgcttcagcctgaatacaggttgaagcatttttttaaagaaactattatcaatggaggaaatgatcatggcaatcacagctagtatggtaaaagaattaagagagatgacaggtgcaggaatgatggactgcaaaaaagctcttaatgaaacaaacggaaacatggacgaagcagtagaatacttaagaaagaacggacaggcaaaagctgacaagaaagcaggaagaattgcagcagaaggtcttgtaaaagctgttgtaaaagatgacaaagtagcagcaatcgtagaagtaaactctgagacagacttcgttgctaagaacgctgacttccaggcatatgtagaagaagttgcaaatcaggcagtagcaacagaagcagctgatatggatgctttcttaagcgaagcatggttagcagacaacacaaagactgtaaaagatgctttgacagagaaaatcgctgttattggagaaaacttaagcatcagaagatttgaaaaagtagttacagacggatgtgtagtaccttacatccacggtggcggaagaatcggtgttttagtagaagctgagacagacgtaatcaacgacgagatcaaagcttgcttaaagaacgtagcaatgcaggtagcagctatgtctccaaaatacgtttcacgcgatgaagtatctgcagaatacttagagcacgaaaaagaaatcttattagctcaggctaagacagaaaacccagagaagccagacaacatcatcgaaaagatgatcatcggacgtctcaacaaagaattaaaagaaatctgcttattagatcaggcatacgtacaggatggtgacttatctgttgctaaatatgtagaaaaagtagcaaaagaaaacggtgctaacgtaacagttaagaaattcgttcgtttcgaaactggagaaggattagagaagaaaaacgaagactttgctgctgaagtggctgcacagatgggaaactaaatatttcttataagtaaatcgaattacacatagaaattgtaggggcggtgatgaatcgtcccttttcctttagaaagacagattggtttactatcgccaatctgtcttttaatatatataaagtaggtagagtacaataaaaagtgctataatggcatatgtttaaaaggttaatgaggaaagggaagtctaagcaatataatgtcgagggaaatgaaaagacaggttgaggaacggcgtaagatattagagtaaaaatttgaagaaaagtatgaatgaattcctgatattttgggttatacatgctttcggacaagtgagaaggggagttttacagttacgggattgacatgggcaaaagcgattgtggtagagtatgcattatcagaaactgaggcgaaaaagaacctatttgaggatggagacttgttctacttgaatgaactagatgaagagtagatgtttcaagctatgatacaagaaatagaaacgtaaatatatcgctgattgaaaaagttggcgacactagtctatagtattttagaaaatatgcgcccggtttatgagatgattagaagatatatacgaattttggacgttataagataaaaggtgaacattatgaatcaagagaaaattgttcaattaaaacaaggtttgacaacagcctttattaatcaaaatacttcttcaaacttggcttataagccacagtttgtatcaaataattatagagaaggaagaaaagttatttcatccatcgaggatgaacttttgtcatgcgaagaatttgcaattagcgttgcatttattactatgggagggattacaccgcttcttcagactttgagagaactagaacaacgcgggatatccggcaaaattctaacaacggattacttgatgtttagcgatcccaaagcacttcgtatcctcgcaaattttaaaaacattcaattaaaaatgtttattaccgagaattctaaagaaggatttcatacgaaagggtatatttttaaaaaggaagaaatgtatcgaattattgttggaagttctaatatgacattaagtgcacttacaacaaatcgtgagtggaataccaaaattgtttcgacagaacagggagaatatgcgcaaaacattgttgctgaatttgaaaatttatggaatgcgcagcaatcactaccattcgaacaatttatagaagcttacactaatatctacataaaaaataaaattattcaaaagcagaaagaattggcgaagcaagcagaaattccatctttggaagtatatcgtttacaaccaaactctatgcagattggttttataaataatcttcgaaaaatttatgaaactggagaggacaaggcattattaatttctgcgacgggcactggaaaaacttacgcttctgcatttgcagcaagagaattggaatttaaacgtgtgttatttctagttcatcgtaatcagattgtcaaacaggcattgaagtcttatcggaaagtattcggtggtcaggtttctatgggaatggtgactggaaaatatcaagattacgatgctgactttgtgtttgccacgatacagacattaagtaaaacggatattcttagtcagtataacaaggagcattgggatttgattattattgatgaagctcatcatagttctgcagacagctacaagaaaattatggattatttcaagccaaagttatggttggggatgacagcaacaccggataaacgcgatgatcatctaggagatagaaatatctatgaaatttttaatcatcagattgcatacgagatacgtttgcaaaatgcaatggaggaaaatttgttatgcccatttcattactttggactcacggatctggagattatcgccgatgtcggcaaatcatcggaagaaaaagttgaaaattttagatatttgacatcagatgagcgtgtgctaaatgtaatgaaacaggcagaattttttggatatagcggagaaagagtgaaaggattgattttttgtagccggattgacgaagcccgtgagctatctgttaagtttaatgaaaagggttggagaactcttgtgttaagtggtggtgattcagaaacggtgagagcaacagcgattgaacggcttgctggtgaagagaaagaagatgcattggattatattatttctgtggatattttttcagaaggtgtagatgttccagagatcaatcaagtaattatgcttcgaccaacagagtcgccaattatatttattcagcagttagggcgtggacttcgcaaagtggaaggcaaagaatacgtagttgtaattgattttattggaaattatcggaataattttatgattccgattgcactttctggagatagaagttacaacaaagacaatatccgtcgctatgtaacagaaggaggacgcgtaattccgggagcaagtacgattcactttgatgaaatttctcgaaagaaaatttttcaggcaattgataatgcaaatttcagtgatattaaattaattcgtgagaattatgcaaatctaaaaaataagttgggccatatacccgcacttgccgattttgataaatatggagagatggatgtacttagaatctttgataataatagcctgggatcttattataagtttcttgtaaaatatgaaaaagagtatacaattcgtctgtcgaaagaggaagaaaacgtaattgagtttgtttccaaaaaaatggcgagtggaaaaagaattcatgaattggaaatgttgaagcgattgctcaaatatcaacatggaatagtggacttattaaagaaatcattgcgtgaaaaatataattgttctatggatgataattgtgtagagaatgttgtgaatataatgacaaatgaatttcctaccagtgcagctaagaagaggtatgctcagtgtgtatttttggaaaaagagggttcggattatggtgtgtctaaattatttggagaaatgttgaagaataaggatttctataacattttagaagaattaattgactttggtatttcgcgttatgaggaaaatttcagtatgagatatcaagacacggacttagttctgtatcagaagtatacatatgaagacgcttgtcgtttgttaaattgggaaagaaatgaagtgccattgaatattggtggatataaatatgataagaaaacaaaaacgtttcctgtatttattaactatgacaagcaagaagatattagcgatacaaccaaatatgaggatcactttattagcaataatcgtttgattgcaatttcgaaaagtggtagaagtatagaatcggaagatgtgcagaatttcttaaatgcgaaagaacgaggaatagatgtgcagctttttgtgagaaagaataaagatgataaaatttcaaaagaattttattatcttggtagaatggcttcaactggaggagtaaaagaatttatcatgcccaatacagataaaacagcagtggaaattgaatgggtattagatactccggtgagagaagatatttatgaatatattgtaaatggataatagaaacggtgggagatcaaatgaaaacaattagagtagtggcagcgattatcattgatgaggggaaaatatttgcaactcagagaggatatggggaattcaaaggtggttgggaatttccgggaggaaagattgagcctaatgaaacaccggaagcagcaattgtaagagagataaaagaagaattggacacagaagttcaggtaatcgaattgctggatacagtcgaatatgattatccgaaatttcatttatcaatggattgctttatctgtcaggttcgatcaggagacttagtattaaaggagcacgagtcagctgtatggctgaccaaagacactttgtatagtgtggattggttgccggcagatcgtgtcttgattgagaaaatagaggaagtaatatagttttttaagaaataatgagagcgcttgtagaaattgatatgccccttgtcaagtagacaggtaaaatatctaaaattggatgtggatgatgcctgcatttccttttgaagtgcaggcatttttctatgcacaccatttctctttatatttgcttattcgtttgttttcaggaatcgggtattctgtgggtacatcagatgacaatgcttcctggcgcacttctgatggggttttacagctatatctgtcctgtggacgttcttcactgtaaaaacgcaaataatctttgattgcatatcttagtgaaacctcatcaatgatttcgtacatctgatacatttcagattttataattccccagaaaccctctatcggtccattgtcgatacagtgtccaactctggacatagattgctccatttcctggttttcaagttttttcctgaatgtcttgctggtatactgaaatccccggtccgaatgaaaaatcggtttggcatccggatttgctgcgattgccttatcaaatgtcttaaatattaatctgttgtcgtttcttgcacttacaacatatgctacaggatatctgtcatataaatctataatggcacttaaatacagtttctttttctctccaggcactttgaattccgttacatctgtagcccatttttgattgggaacagtagcatagaaatccctttgaagtatattttctgccgtttcatccggcttggcataaatatattttttcttctttttacggattacagaatggattcccagctttttcataattctgtggactctgtttttactgtacgatgtatgattgaaatggttgatccaggatgtcattcgccggtatcctaagatatggcaaaagcgttcatcatattctttgacaagttccgcaagtctgatattttcaagttcctcatacggcacttcacgatgtaaccatttataataagcagcccttgatatctcaagctgtctgcacatccattctatactccagtttttctttgtataaaaatatcggattgctaaatattttgattcatggcgtaactttccaagcttcacatcccttcgaattctttcactttttttaacagttcaactaccatatccttttcttccaactgacgcttcaaacgcagattttcacgccttaatcgttctagttcatccacttcggcatctgttttgtgacgtcctctccgatccgttaatccatctgcaccatcggtgtcatatttttttacccaggaataaacctggctataagaaacgtcaaattttgcagcggtgtttttatagttacgattatgattgatacagtaatcaacgatttctttccgttcttcaaatgttgtttttcttcgtgcttctgccatatagacctcctgtttcggattgtaatccttaagttctctattggcattatacattctaatccattttcttaaaagaccggaagagatatcatattttattcctaaatcaatggaagagccgtcacctcttacatattcctcaaccactttcattttaaattctttcgaataagacccatttcgcattttttttgaaaaaccggcaagtccatgtttattataaatcaaggcccagtcctgaatagttcttgaagaaatacatagttctccacatatctgtgttctagatttatttccttcaagataatctataacagcctgttctttttcttccggtgtaaactttgcttttctggacatgaaaaatacctccaaagtaacagatttttatatttaatctgtctactttagaggtatcatatcaaatacaggtgcttttattatgcggaaaacgagggaggaatttgatcaagcattgacaataaggggaaggtgtgatagtataaaaaacaattaattcaatatagtaaagtggtcaattactaacgtgataacgcaagagaaaggagaatgaaaagcatgaaaaggaatttagcaatatttttcatgggaatgacaattgcaacaatggtgctcgggggatgcggagataaagaaaatatttccaaaaaggatggaaaggaatctgagcatgtggaggataagaagacatttacagtaggatttgatgcagaatatccaccatatggatatatggatgaaaatggagaatatacaggatttgatttggaactggcagaagcagtctgtgaactggaaggttgggagctggtgaaaaagccgatcaactgggattcgaaagatatggaattaaattccggcgcaattgattgtatttggaatggatttactatgaatggaagagaagaggagtatacattttctactccgtatgtagataacagtcaagtaatcgttgtggcagagaaatccgacatgaaaactttggaagatttgcagggaaagagcgttggcgtgcaggcagcaagtgctgcactggatcttttacagagtgaagaagaaggtggccagaaggcactggcagatacctttagcgctttgaatgagtttgcggattataatacggcctttacagaacttcaggcaggtgcgctcgatgctcttgcaatagatgtaggagttgctaattatcagatcaaatccagaggagaaggataccagattttggaagaaactttgaatacagagcagtacgcaattggatttaaaaaaggaaatcaggaattatgcgatgtagtcaatgccgacctgaaaaaattgacagaagacggaacgattgcaaagctcgcggaaaaatatgagattgccgatatggtaactctaaaataaaaaagatccctttgaaagaggacttcttttcaaggagattctgataggaggaagaaacatgagttttggggtaatgttgaggcaaatgacagcagggtttggacagacttgtctgatttttgtcatgacactgattttttcgctgcctttagggctgttagtctattttggaagagtcagcagaatcaaactaatcagctggattgtgaaaatttatatctcggtgatgcggggaacacccttgatgctgcaacttctagtatggtattttgcaccatattatctgtggcagatgaatattggaggatacaagctgacagcaattcttcttggatgttctttgaattatgcagcctattttgcggaaatctatcgttctggcatagagtctattccaaaagggcagtatgaagctgctgcactccttggatattccagacagcagacgtttttgagaatcgtactgccacagatggtaaaaaatgtgctcccatctgtgacaaatgaagtaatcacactggtaaaagatacatctctggtatattcattatcttacattgaaatgtttgcggtagcaaaacagattgcagcagcacagacaacggttgttccattttttatcgctggtgtattttactatattttcaattatgcagttgcatggggaatggaattgtttgaaaaaaagttgaactattatcgttaggaggtttcccaaatgagtcttttagaaatgaaacagatcaaaaaagaatttgaaggtacaacggtaattaaggatctttcgctctccgtagaggagggggaggttttggcaatcatagggccatctggatccgggaagtctacgttgcttcgctgcgcaacaatgctggaaactatcgatgacggggaaatactatatcagggaaagaaggcagtatggatagagaatggaaatccaacctttccgaagaagcaggagttgaaagaaatccagtcctgtttcggtctggtattccaaaattttaatctgtttccgcacttttcggtcataaaaaacattgcagatgcaccaattcatgtacagaagagaaaccgggaagaagtttacgaggaggcaaaaaaactattggcaaagatgggactttcggataaagcagaggcatatccttatcagctttccggcgggcagcagcagagagtgtcgattgcgcgagcactggccatgaaaccgaagatgttgttctttgatgaacctacatctgcattggatccggagctgaccggagagatcttaaaagtaatcaaagatctggcgtcagagcatatgacgatggtgatcgtgacacatgaaatggattttgcacggaaggtagcggataagatcatttttatggagaatggtgtcatcgcggtggaaggaaatccggaagaagtctttgcatctgatcatggaagaatgagggagtttttggggaaattgtccatgtgattctttgtaagaaacttgtttaatagtagccaatgccgtatactttatgtaaagaaaagtgcaggagagaatcctcgtggggaaaagagagttgcatttacagacgagattttttgcgaaagcagattatgaaatattcatattgcaattacaaaatggaaaacgataatatttggaagtagaggaaaggaaattgattatatcactgtcattattagatacaaatctaagacaattttttggtgaagtgaattcggggaaaacgcaactacaggaattacttagaagcattttataatacgaaacgaatccatagtcactgtgattatatgtcaccaaatgattatgaaaagttgtatcggaagcttcagcaagacgaattgcagcttgcaggttaagataaggaaaatctcattttaacatgtactaaatcttgacataggaccaaaggtatatggaataaaaaacgtattcatttgtatagcggtatcccagcgtgttgtgaaatagcccctataatgggatatggaaataagtacataattgattcatatcgcaggaaagtaaaagaggcgcatggggattcggaggttggtgtgacgatgaacacctacacgcatctcgatttagacgatgcaaagaacgagatgattcgaatggaagagttggaacaggcaaggaaggaaattgataaggcagaaggtaagaagccaatgaaacaaaatgtgttcaaagtagtataatataggcagaagacgctcagaaatttagatagtccttgggcgttatttttgtgttggaaattgtgtcgaaaccaaaaaaatagtataattgataacagttgaatggagataagcttataacgattgcttttgaaaatgcacctctatgcaagcaatcgttaaaaagtttgaaaaaatccgagtagtctgccccctcttaactgactacaaatgcctactacacttttcgtcattttgccttattttgcaatttttatcacactttcgcgtgatagtgtaataaaataaaaagaccgaaaaagtacgtaaaatagggcaaaaagaggcgtttcaggaggaaaaatacaatgattaaaatactattcatttgccacggcactccagttttactataaatcatacctttgcaaacttgggcaacacagggcataatatggtaagtgcttagtttcggggtagatataaaaaaagaatttctagcatctacgcctagacgctaggaaaacaagcattttactccatttatttacatagctcctgaacgtgttcgttccaaggagcaagagtttcgaattctttgtctgacatatccttatttggacgatgttcaaacaggaacttcagataatcgtataaatttaagttataggttttagccatggtgttattaaagaatcgaatggtagaattacccatcatgatttccatagcaacactagcatcagtatcaggctttgctagagtgcgagtgttttgctccattagtgtagtagttggtgctggttccagaactagatctactttgacaacttcctgatgaacaggggttcccaagtgcctactctcggaattaggtattgtcacacccgctttgcgtaacttactgacccagttgtaaaaagtaccagcatggattccatgtgtttcacaccactggtaatcagaaagaccgctggaacggcattccataataagtttcagttgttcttcacgattgacacgttttgctttcataattgctagcctcctagtagagaaaaacgcttgcgttataatcgcgaaatagagaaaaacgcttgcgtttcctagctacaattataaagcagaaacggagtggataaaatccaccccgaaactgattgatatgatacctctaaagtagacagattaaatataaaaatctgttactttggaggtatttttcatgtccagaaaagcaaagtttacaccggaagaaaaagaacaggctgttatagattatcttgaaggaaataaatctagaacacagatatgtggagaactatgtatttcttcaagaactattcaggactgggccttgatttataataaacatggacttgccggtttttcaaaaaaaatgcgaaatgggtcttattcgaaagaatttaaaatgaaagtggttgaggaatatgtaagaggtgacggctcttccattgatttaggaataaaatatgatatctcttccggtcttttaagaaaatggattagaatgtataatgccaatagagaacttaaggattacaatccgaaacaggaggtctatatggcagaagcacgaagaaaaacaacatttgaagaacggaaagaaatcgttgattactgtatcaatcataatcgtaactataaaaacaccgctgcaaaatttgacgtttcttatagccaggtttattcctgggtaaaaaaatatgacaccgatggtgcagatggattaacggatcggagaggacgtcacaaaacagatgccgaagtggatgaactagaacgattaaggcgtgaaaatctgcgtttgaagcgtcagttggaagaaaaggatatggtagttgaactgttaaaaaaagtgaaagaattcgaagggatgtgaagcttggaaagttacgccatgaatcaaaatatttagcaatccgatatttttatacaaagaaaaactggagtatagaatggatgtgcagacagcttgagatatcaagggctgcttattataaatggttacatcgtgaagtgccgtatgaggaacttgaaaatatcagacttgcggaacttgtcaaagaatatgatgaacgcttttgccatatcttaggataccggcgaatgacatcctggatcaaccatttcaatcatacatcgtacagtaaaaacagagtccacagaattatgaaaaagctgggaatccattctgtaatccgtaaaaagaagaaaaaatatatttatgccaagccggatgaaacggcagaaaatatacttcaaagggatttctatgctactgttcccaatcaaaaatgggctacagatgtaacggaattcaaagtgcctggagagaaaaagaaactgtatttaagtgccattatagatttatatgacagatatcctgtagcatatgttgtaagtgcaagaaacgacaacagattaatatttaagacatttgataaggcaatcgcagcaaatccggatgccaaaccgatttttcattcggaccggggatttcagtataccagcaagacattcaggaaaaaacttgaaaaccaggaaatggagcaatctatgtccagagttggacactgtatcgacaatggaccgatagagggtttctggggaattataaaatctgaaatgtatcagatgtacgaaatcattgatgaggtttcactaagatatgcaatcaaagattatttgcgtttttacagtgaagaacgtccacaggacagatatagctgtaaaaccccatcagaagtgcgccaggaagcattgtcatctgatgtacccacagaatacccgattcctgaaaacaaatgaataagcaaatataaagagaaatggtgtgcatagaaaaatgcctgcacttcaaaaggaaatgcaggcatcatccacatccaattttagatattttacctgtctacttgacaaggggcatatcatatcaatagcgggtggattattgtttcgcccatctccatttttcggatcaacgaaaaactccaatgggcgaaacagactaaagtccatataaaaaagcagaaagcatagttttataaacgactacgatttctgctttttgctaaagttaatgacattgtgtaattactacggtttcgactactaaggaacatggggatagagccgcaatagtcaaagaaattgggagaaatccttagtagtaaatgactactaagcgacgggaaatatacaacgctttgaacagagaaagccacaatcaatggtagcagtgttgtggattgtggtttctatttatgacatgcgcgtgcagaaatgtattgtaaatgttgcacgcggatagtataatttttatgggaggtagacctatgaataaaacaatttcgatgagtattcgtgtaagcgaagaagagctagataaattaaaacaagcagcgaggcttgaagcgtacgcatcatatagtgaatttataaggagaacggcattaattgaagctgagaaagtaataaagaataaatctacggatgaggtgcgaaatgataaataaaaataatttagtggatgtgttgaaatacctaaattttatcaaaaagggcaatagttatgttaaacactattctgagtattcttgtgatatgatggtggatttaagaaatgaaaaattagttttcccaatacaaatagaaggcagagagagaaatgatggatttgataagccagagaattttgttgtttttgaatgtgttgacagtttgttagctaaaggatatagaccagaacatattgaattggaaaaagtttggtcattaggtcatgatgcaaaaagcggtagagcagatatctgtgtatatgatgagaatcatgaaaagatgttatttattattgagtgtaaaacatttggtaaggaatattcaaaggcatatgtggatacaaatgctgacggcggtcagttgttctcatattggcagcaagaaaatgcaacgaaatggctggctttatatgcatcaggttttgatggaaataaattgatgcgtaattgccaagtgataaattgttcggatgaccctaatattattcagttggccaaaaaagataaaagtgtaaaattatatgccaatgcacatactgcactagaaaagcatgaagtttggaaggaaacatatgctggtcagtggcttgataatctgattttaggaagtgattcggttgcatataaaataggagtaaaaccattatataagagagatttaaaggattttaccccagaagataaaattgtaaataaatttgaagaaatattaagacataacaatgttagtgataaggagaatgcctttaatagattagttgcattattcatttgtaaactcgttgatgagatacagaaaacggatgatgacattgttgatttccaatataaagttggaactgatacatatgaaactcttcaggatcgtcttcagaaacttcataaagaagggatggaaaaatttatgaaggaagaaatattttatgtttctgatgattatgctgaaaagttggttcatcaatatacaggacaaaagcgagagaaaatgatagaggatttaaaaggtacattgcgtatcttaaaattctacactaataatgattttgcatttaaggatgttcataatgaggagcttttttaccagaatggacgtattcttgttgaagtcgttcagttatttcagggttataggataattggttcaaataaccttcaattcttgggggatttatttgaaaaattattaaataaaggttttaagcaaaatgaaggacaattctttactcctgtaccaattgctcgtttcatttggaatagtttgccagtgaaagaaaaaatgattttagatggaaagattatgattcccaagataatagattattcttgcggagcagggcactttttaacagagggagtggagattattaaggatatacttgatgctgttccagataaagaggatatagatgcaaactggattgagcatagtatatatggaattgagaaggattatcgtctggcgagagtatcaaaaatatcactctttatgcatggtgcaggaagtggaaatatagtttttggagatggtttggataattatactgataagggaatatcaaatgctcaatttgaatttcttgttgcaaatccaccatactctgtttctgcattcaaacaacacatgaaattaaatgataatgagttgatgattgtagataaaatatcaaatgatggatcggaaatagagactttatttattgaaagaacggcacaacttgtaaaacctggtggagtagcagctgttattcttcctgctagtattttacttaatgaaacttcaaatagttatatttcagctagagaatcattattaaagaattttgaaattaaatctattgtaaggttagcaagtaaaacattcggagagactcaaacaaatacaataattctattcctaaagaaatatgatgagccacccaaaagaagtgatatgttacaggatagcgtagatgcaatttttaatgttgaagatataggcgattgggaagatatggatattatctgtggctatatcgataaaataggcatagctagagatgagtattacgatttcattacagaaaaaattgaatatggggattttgacaagaattcatattttaagatgtatgaaaaagagtttgctaagcagagttttgttaaaaataaagtaaaacaaaaaggatttaaaaatctttcagacactgaaaagaagcaatggtttacgcaggctttctataagtgggcaaagaatattgagcgtgaaaaagtatattattttgggctagtatacacacaaacaacactggttgtaaccgctccaaaagataaaaagaaacaagtaaaatttcttggttatgattggagtaaacgtaaaggccaagagggtattcaaccattaaaaaatgggggatgtttatattctgaaacagatagaaatgcagaggataaaatagcgcatttaattaaagcttcatataaaaatgaaatgatttcagtaaagtcattagatacatattatacctatacgagcttacatgagatgtttgattttgataaattcaatttttcaaaggcaataaacacaaatgtaaatcgaaagataaaaattgatagtaaatatactgtaaaaagattaggggcttgttgtgagaaaccgtcgtatggagctactgtaagcgctgttgatggggataaggaaaaagactataggtatattagaataacagatatttcagatgacggattcttaaatgataattggatgactgctgaggtgattgaagaacagtatgtattacgagatggagatttcttattcgcaagaacaggagctacagctggaaaaacatatttatacaaggattctgatggtaaagcgatatatgcaggttatttaatacgctttagaactaaagatgctcttttgccggaatatttagatatctatacaagaactcattattatcttgactgggtagaggaatataagaaagtaaatgaaaggccaagcttaaacgcaaatattttcagtgatgttctattacctataccacctgtggatattcaacaacaaattgtagatggatgtaagccttttgatgacgaatatttgaaactctttagacaacagcaacaaattgaaatgaaaattcatcaaatatttaatgaggcacaaaaaagcgcgaagtttgagtataaactatctactgagtctgattttgaaataggaattggaaaacgtgtggttcagtcagaattagatgagaagggtaagatgcttgtgtatagtgctaatgtgaacgaaccggttgggaaaattacacgagagagcattttagacaattttgatgaaccttcagtactgtggggaattgacggagattggatggtaaattatgtagagtctaaaataccattttatcctactgatcattgtggatacattcgtgtgaagaataaacaaataaatccggagtatttttcgatggtgctggatgaagaaggaattaagactgaatttgatagaacaaacagagcttctatagaacgaataagtgctttaattgttaaagttccggatattacagttcaggatgatgttgtctcaaaatatcgcaagtataaaaaagaattgttatcaataaaggaaaagaaaatgaaggtgttgtcagaaaaagaacatgtgtttgatggattgataaaataaccagggggatattaatctctagaacgattgatacagaagaccgatgccccctcaaacgcaaattttcgcgaaattgcatagggggtattcctagaattttatgatttgaagaatagagatgaactaacagcaatgtggttcaatggaattattttgaaatgaatagtcttttcagttgttccgtagaataatatagactaggtgttcgaatgggggattacatgatatactaacaacatcatgttgcgtccccttggaggtaaaatatgatttcaaagagacgtgatgataaaggaagagttctccagcaaggagaatggcaggaatcaagtgggcgttatcgttataaatacacggattcacttggaaagcgaaaaatattatatagttggagattaacagaagcagataagatgcctgaaggaaagcgagcagatctttcgctcagagaaaaagaacgaaaagttcagtctttgcagatgcagggaatcacggggagtaagataactgtgcttgagcttgtagaatgttacctttccctgaaaaccggagtaaagcataacacattagcaaattacaaatttgtggttaatgtactgaaaaaggaagaattctcctataaaaaagtggatgaggtaaagttggctgatgcaaagatatttctgatcaagctgcaaagagacggcagaggatatagctccatccattccatcagaggtgttttgagaccagcctttcagatggcagtagacgatgatctgattctaaaaaatccatttggatttgaactgggaactgttctagtgaatgacagtcagaaaagagaggctgtttctctagaggatgaagcgaaatttcttgaatttgtaaagaatgattctcattacaatcagtattatgatgcatttttattctgtttaagacaggccttagaatatcagaattttgtggactgactgtgaaagatttagatttaaaaaatgagattataaatgtgaatcatcagttacagagaactcgggatatgaagtatgtcattgtatctacaaaaactacaagtggaacaagattacttccaatggaaacagaggtaaaggaggcttttcttcgtatcttaaagaatcgaagaaagcccaaaaaagagccgatgattgatggatacggagattttctgtttctggataagaatggaagaccgatggttgcacttcactgggaaaagtacatgcagcatgcaagagaaaagtatagtcgggaacatttgttacagttaccgctgattactcctcatgtatgcagatatacatattgcacgaatatggcgaattccggaatgaatccgaagacattgcaatatttgatgggacactcagatatatctgtgatgcttaatatttacacgcataccggttatgatgctgcgaagaaagaacttgccagattaaaagaagcaagggatgaactggataagaaccggtttataactcaaaaacatgcacaaacaactcgtgcaagccttatttcataaggattttcggactgggaaaataactcatttataccccaaacacccgaaaaaacatgaggaaatacaagaaattataagaaaaagaacctttcaagagaaaaatgcacaaaggctgaaaagtcagtatttataaggctttgagaggatataaggagataaaatggagaaaataaaggtacttttcatatgtcacggcagtgtttaagggacgaaagccttgattttatggggtgcttggatgaagatgtggaatttacacctttggaagatcgaatcggtagttaagacgtatggaaactataagagatatgtcttgaaaattagaaattgatgaatgccaacataaaatcaagaagcaaatgcatgtagctgattttttacaaaagaaattttgacagtaatatcgaaagccgtataatgatattaacagaacccaccacacctttgattttttctgcgtaatccagtgggactttttcgtttaggggttgttttatgtatcggtatccaaaacaaatattaataatagaatagcaagagcaatcttatgtagatgtagtaatgaagattacatctcgagaagatgtagagaaggcgttaaagacaattggattttatcgtttgagaggctactcgtttcacctatatgataatattgataagaagtattcagatgttagagtgtattatgagtaaggatattgagaccgctcttgaatgttataaaaacgtggactgagcttatcaaagagaaacatacttgatgttttgagggattgtaagacatggcaatcccttagttatgcgtattgcattattgtgaaattagaagatgggatagacactattgaaaactaaaagatattggaaaataagaaagatactattaaattggatttttaaacttaaaaagatatgctttactttggacagtcgaagacagtcatctaaggaatattggtcgtttaacagacttcttttggagagatttgtttctggtgttattaagggaataatattagcaacaattcttggtttgttggataggctgttacttagaattggcgtgatactggttataaatagtaatattttgtcagatgtacttattggagaattgggcgttgcaggtgttattttaggattgtattgctctaatatttcaagtatatattctacaagatatgctaatgctccagaaaaaatagctattgcctttcaatatgataggttgacggtaaagtgtttaaatgccattagtagttgtataatatatggaacaattatacttgttgaattattaatgggatatgacgttggttgggtatctgccggtacattaattatatggtcaatattggttgttatttcttttggaataactggaaatagaatataccagttgtcagatgtatttagagtatcagatgatgcttatattgcattaagaagagtgattaccaaaagtcttaatcgagaattgtatgcatcagatgcaaattatcaaaatcacttttgtaagattgcatcagatagaattgaattactaaaagttattcaaaagtatggatgtaatcctgattcggcagatagctcatctgttcttagttttatgtgtacgaatctaggccttattgaacagtattggtttattaagaggcatatttcgagagattcattgtggtttaggagaaaaggagcatatcagaagtggcattttgctaatgacacggaaacctcaatggcgttaagaacaggaacctcattaagaccaaaggaagaacctgatttttattggttcgaagatgaattaatgtcaataaatcatgcatgtgtaaattatttgattaaaaggaatgactggggtactttatatagttatttttcagtctttgagtcagtttgcaaatctgcaatagaacaaaaagaagcaaattactatgtaggacaaattgattggctaaaaagtgttattcaaagttttgtagataacactaatatagaagagaatgttgcctttgcaggaattgtcgaacatatttctcttttatatttggatataatattggagtcaagtaagtattttagtaatcttgatattaatgcaataagcaaatcggttataaaaggaattgacaccggaaagagatacaattctataaaggcaattaggggaagaaattatatagaaatatataagaagatgataactgaggtttatgcagaaggacatcgtatcactcctgattggttaattaagcagtatgtggcaaaagaggagtttgtttatgtaaataccttatttgatatggttaaggaaggtgttgaacaggcatattcattgagtagtttttttgttgagaaaaatatgcattatgaagcgtgcattatgcttacaagattctatgaatatgagtctaagttgtcaaacttctttaaatttgcaaatcaggtagaaaagaatttaaataaatatcatttggattctgcagataaatgggatgacagtagattggcaggagtagaagaaaaatttttggaatgtaaaaaagaacttccagaaatgttgctaaaatgttcaagtgcttttgcaattaaaaattgggatagaagagaagaatatcctgactttttaggtgattgctataaccatattgcagaagatgcggttgaggctattgtcaactcagataaaaagcaatttgaaaaagattttgagaatctgacaaagataatgtttttataccaggagtatatcagatcagattttataaagaataaagatttatatagagtagaatatgcatattatatgtttacgtctccgattgttgaatgggcacaaattggaggacttggaatattgtggggagaattttttaaagatgtagaatggtgtagtattgtaaaaaaagccttaaaacttgtatttaatgtaaaagaggatgaggagaaatcaacagaggttgcggctcaattaatcgaatttgcatcacagagaaataaatttctttttggcataggggcaagaaatatgcttgcaacaaattggaatcaatttgttgcaaatgcaataagagagtctgctactattgaaacggaatatgttatgttcggacaagcgataaagactgatagtaaaattattaaagcattttgctcaaattttttagacatgggatttacgacagatccatccgaagtattttgggttatatgtattaatccgctactccctgaggaaaagagatttcacactagattttcgtgggaggatgatttgaatgaataatatgttaagaataaaacggaagatggaaaaagtatataaacgtcccattgataacctttattcgcatagtttttacagtgatttgttttcagattatgagtattcgttaagtgaagggaaaattaatggaagagatttctacataatcattccagatgataaagagattgtagaattatttggaaacggtaggcattatgatttttcatatgagtttagtcaatctattgatagagttctttatagcatggctgtttatggaaaggcatatattttcgtaaagccagattatattaacgaagctgatgagaatggaaaagaaattaaaaaaccaagtgccattcatataggagaagtaaaaggaattccaaagaaaggtaagttttactcaaggacttattcaaatgaaatttctgaatttaatattgaagaaggtaaattaattacttttgaattaaaggattttggatataaaagaaattactttaaaaaccttgtaaaacatttggggaaatatgatattacatctaattctctagaattaataaacactgggcttgcatatgattttagtgtacatgcagataaaaacagaaaaaggttcttaaaaaaggtgagaaacattggttggagttttggaacggatggtttatcggatagttatattttgtataaggaaatcaaaatgaagctatttaaaatgcagatacttcaaaatgtacttatgaaaattaatcaagtgatagcaacagaatatattcccaataaagaatttgaaataaaagcgttaaccagtaatgttgactatgtaggagcgtggactaaattccaatctggagaattaacagtttcgcaattgagtaatatagtatggaaaggaattactgattaagtgaatatgtttactgtagaatgcaggctcctcttgcggaagtatcctaattgcaagtcttatcccactaaaacagagccttccattaatgactttaggtacaagctaaaatgagaaattccaaatgcacataagcatgatgtaagagaatttgccataagtttccttggttaccttacaacaaaccactctagaaatgtcaaggtctggaacgacttaacatgtaaacgctcaaaaggttctttccagtattagttgatttcaaagtattaaattgatatgatatgtatatagttggaggtagcaaacaaatgaaagattttattactgcattagatccgaattatcaacttgacaaatatcatatcaaaaataatgttgctgtattttatattagctccaagatgagtgaagtaaaatgaccttattgtggtactctttcatcaaaggtacattcatcttatgaaagagaaattcaagatcttcctatgcaaaatagaaaggtaatacttcttgtgaaaactagaaaaatgttttgttctaattgcaaatgtgaaaagaaaacattttctgagtgccatccatttgtagaaaataatggaaagaaaaccagaagacttgttcagaatatattatttacatcagcacagcttagttctgtgaatgcagcaaagattctaaaatcaaacagtatagaagttggaaaaagcagtatctgttctttgcttaaaaaaatgccatcaattatggataagtcttctgtaaaaaaagtttgtgttgatgacttcgcgttgcgcaaacggtttttgtatggaacagtgatggttgatttggaaagtcagaagataatcgatttgattccaactcgaaatactaatgaagtaaaagagtggttatcaaaatattctaatattgaagttatttctagagatagtgcacagctgtatgcaaatgtagcagaaagatcgcatcctggtataatccaagtaagtgacagattccacataataaagggactgactgaggctataacaaagtatatgataagaacatttcctgcacgtatagaaattccagcagtaagcgctgaagcggatgaaattttaaaattacataacataaataatcgcaaagaacgtgttagttttgctcaccaaaaacgttcggaaaatatgacagtcaatgaaatcgcattattattgcactcctccgtaaaaacagtttaaaaatatttgatgctcgatcctgatgaaattgaaaataggacaattgtaaaggaaaagaaaaatctattagctatgaaacagaaacaaaatgaagttaatgaggcaagagcattagctaaaaaaggtgtgtctatagaagaaatagccaagactatgcatcatacctataaaacgatacaaagatatttatctccagattattctgttgaagatggacattacaatgctcgtattccaggaaagcttgcaccatatgaagctgaagtaattaagttaagaagcgaaggaatgacttatcccaatattcataaaattattaccgaaaaaggttataaaggttcagttgcatccttaaggatgttcattcaaaaagaacgtattcgaaatgaagcacatttaagtcaataagagacctgctcggattatcaatcgaaagaatacattcagagaagatctttgatacaattaatctataagggattaagtgatgtcaagacaattaccaaaacacaatatgagcaagttcttaaaacgtacccagtgattacagaattatatgctgcaataaaagaattctatgagctacagacctatgttaacggcataagaattgatattaatgcggtaaaaaacgggataaaattaaagtataataatggacttgccgaaggaagtgtcaacaaaattaaagtaattaagagaattatgtatggacaaaatagttttgatttattaaaagcaaaagtgcttttacacgagcaatttcgctgtgaattcaactaacaatggaaagaaccttttgagcgtttaccattgaagaagcagcatcctattttcgtattggagaaggaaagctgcgtaagctagtcagcaataatccaaatgcagagtatttactttggaatggaaaccgtgtacagataaaacgaacaagatttgaaaaatttattgatacactcagtgcgatataaaatgaaacttaaaagaaggaggtgttcgaattaggggttacatgatatactaacaatatcatgttgcgtccccttggaggtaagatatgatttcaaagagacgtgatgataaaggcagagttctccagcaaggagaatggcaggaagcaagtggacgttaccgctatgaatatacagattcacttggtaagcgtaaaatattatatagttggagattgacagaagcagataagatgccggaaggtaaacgggcagatctttctctcagggaaaaagaaagaaaagttcagtccttacagatgcaagggattacaggaagtaacattacagtgcttgaacttgtggaacgatatctttccctgaaaacaggagtaaagcataatacattagcgaattacaaatttgtggtgaatgtattgaaaaaggaagaattcgcttataagaaagtggatgatgtgaaactttctgacgcaaagatttttctgataaaactacaaagagatggtagaggatatagttccattcattccatcagaggtgttttaagacctgcttttcaaatggctgtggatgatgacttgattctaaaaaattcatttggatttgaattaggtacagtacttgttaatgacagtcagaaaagacaagctgtttctccggaagatgaagcaaaatttctcgagtttgtaaagaatgatccacattataatcagtattatgatgcattttatatcttatttaagacaggtcttagaatatctgaattttgtgggcttactgtaaaagacttggactttaaagaagatattatgaatgtgaatcatcagttgcaaagaactcgagaaatgaagtatatcatcgtatctacaaagataacaagtggtactcggttacttcctatggaagcggatgcaaaagaggcatttcttcgaatcttgaagaatagaagaaaaccaaaacgtgagccgatggtggatggatatggaggatttctgtttctggacaagaatgaaaggccaatggttgcacttcattgggaaaagtacatgcagcatgcaagagaaaaatataatcgtgaacatttgttgcaattgccgccagttactccacatatatgaaggcatacttattgtacaaatatggccaattcagggatgaacccaaagacactgcaatatctgatgggacattcagatgtatctgtaacacttaatatttatacgcacaccggctatgatgatgcaaagaaagaacttgccagattaaaagaagtaatggatgaactggaaaagaaaaagtttataacccaaaaacatgcacaaataactcatgtaagtcttagttcataaggaattagggactttaaaaataacccatttgtaccacaaatgcccgaaaaaacatgagaaaatacaagaatttataagaaaaagaacctttcaagtaaaaaatgcacaaaggctggaaagtcagtatttataaggctttgagaggatatgaggagataaaatggagaaaataaaggtactattcatctgccacggcaggagtttctcttttacctaaatctccttattttatgcagctttctttaaagtgggaaagtacattacaacgattttacaacttttggaaaatgttccgatatgactattaaaggaaaaatttataaaaatagcatttcccaaaagagtaatgggaggaaaaattatggcagtatgttatttgtttgcaaattatgaagtacaatataaatgtgaatatatcttgaaaaaagaatttatagaagttgatatagattatgatattgaaaaggagatagaaacaaaagatggaattattttatggggaaatagcacaaagtttgaaaagagagatattttaattatcgattttcaaaataaaacaaattatttgttaaagaatgcttattatgctgggatgaatagtacatatggcacgccggatggtggctgtaaaacaaaatttagagcaacgaattattttaaacatagagattatgagaaattaatagatttgaaagctatgccaaaggtatcaggaataagagtgtattctaaatctattaataaactaattggttatccaagtttaaaaatagaaaaaagtgataaagagtacgcgattaaattatcaaaagaaaaatcaaatagaagtgtcagcataaataataatggaattaaagatattgccgtatcggatgattggacatgtaatcgagaaaaaactggaaactttaccattgagtttaatgggtatatcgaaattactttaacaaaaagaaataattatacagaggtttctagttttgttaatgaattagtgatttttatgcagttatattttcctaataatttttctgtggataagatatggtgcatggtgggggaaaattattatgaattaattactaataaaatggaagtgaagtgtacagaaagatatactgaaaagaccgttgaagtaggattattggaatttttaagtggttgttataaaaagattccttataggaagagtaagactgaaatcagaaatattccatacattgtgataaatacctctagaaatattgaagacaattttttgatgttctatagatttatagaatgttattataaaaagcaaaatatacccaatattataaaaagattcgtatcttatagcataagaaataattatgattcaacaattaattggactgatgaacagattgaaaattattcgcaagaaataatatgtctgaggaatcactatgtgcattcagggtatttcataaagaattctagcttgaaaatttcttttgaaaaaatagatgggaagaaaaatccaaaagattatacagtaagtaatttagatataagttggatttatgaaaggacaaaaattctgtatagaattactttagacattatttttagaaaaatgctaggatatgataattataagtttgagaaacacttttaattttatagtaatacaccgagaatgtgaaactttttctgtaaataatgttttagaaggtcttctatggtaaaatattttatcataaggaggccttttattagtttgcgcgccatgggcgcgctcttaagggtgaaagtcccaagtacgcctaggtaacaaggaagtacatagctgaactacaagggtgtttatcgtgagatgaaatctgaaggaagtggtaagcaaatctctggctcgacgaacagaaatcacatataaggctaggttccatttggtaagtctgctagtaaagatgaagccgtaaagttaccgtttgtaggaacagagtaaatgtggcgagtagatggagagaaagagtgtgcaccttaagtgtggaggtctcacagaggttccattagcctagtaacaacgaactgtgagaagtcagccgaacccatagtagtgaagaagtctctgtaatggagatggagcgaaggggcgaacaatcaataagtttgagtatgtctcgtattgcagaaatgacaacatctgccgtaaccaatcgggtaaagggtggtcaaatcaagcgaggcggaaaggaaagaacgcatgtggtcctatgtcaagaaaaagtacaaattaaatgtaaccaattttctctgttctgagcgaagtttaacttgctatttttactgcattctcctcgatgttttcaagatattgttcctcatattaatttagagacaaatatccacagtgactgtgaatgcgcacggtattataaaatgtttcgatgtattcaaaaatcaatttatgtgcatgtgcataattaaagattttaaaccgattaatccattctctcttcaaaagtgcatggaaagattctatacaggcgttatcccatggatatgctttctttgaataactgcgaatcatatctttggttgctttttgaaatgcttccgatacgtactggcatcctctgtcgcagtggaagatcaacggtttttcaacatttctgacacgttttgctttttcaacacattccactacgtgggatgcctccagcgtctcactcacacccaggaaatgatttttcttgaatacagatccatcacactggtaagatacacaaagccttcaaatgtccaaatataagtgatatctgaacaccagacagcatctggatgagtgggattgaattcctcgttgaggatatttttgagtttctggctgaaatcagaatctatggttgtctggatatatggtttcacccaatgggctttaattcccatttgacgcatataatttccaactgttttttcggaaacatactccccggattttcgcaattctgcagtaattttaggagcaccgtagttttgatgggattcctcgtagatcttttgaattttttcttttaaaactgcacggcgaacagacgtgtccgaaggaacccgtttcttccatgcattgtaacccgaacgtgaaacgcctaattttttcagtattccgctgacagaaacctgacgtttgacgggcagggatttgatttctttcacatactcagaagtagctgtgtaaagagcttttgtcagtttcccagaataccgattgctttttttaacacttcaagagcatccttcgtatctcgtaattcacgctgcaatctggcaatctcttttgcctcctcacttgcataatttccagaaccacgagtaggaacctcgcctttatgttcctttgctgctttcatccagtttttcagtgcagattcgctgactccaagattctcagaagccttgcgaagtggaagctccggatgatccaagcgatactgtaccgcatcctctttaaactgttgggaatattttgtaccttttgccataaccattctcctccttgatctatgactatcatatactatttattgaaaatggtcatgtttattttgtactatttatattctaacaccagcagttgaagaactgttattgacgtataaccctcatgggctggtgttttacctcattaccgattttgtggaatttcccgactatccattgtgggagatattcatttcccatgataatttaccttttgaaatgaaccctgtacctgtcaatgtggaacgaactctgcaatggctggaaagacaggtcatgccgtccattgtgatgatagaggaaatcgacaggctgacaggttcaaactatatgaaaatgattgatgaatgtacccacctttccgaaaaacaggaaatgcttgtggaacaaatatgtacggatatagcagacataattgaaagtgagggggtgttttatgagtaatgcacaggatattcccgtatgggaaaaatacactcttaccattgaagaagcgtcaaaatatttccgtatcggagaaaacaagttaagacgattggcagaggaaaacaaggacgctggctggttcattatgaatggtaaccgcatacagattaaacgccgacagtttgaacaggttattgacaaattggacacaatctagtgaaaaaggagctggtatatgttatgatgagaacaagtcatatcgggactctttcagaagtggaaaggagcgaagatgagcgaaaaaagacgggataataaaaaccgtgttttacgcaatggagagagtcaacgtaaagacggaagatatatgtataagtatgtagataatgctggaaatgtgaaatatgtgtatagttggaaactggtaaaaaccgataccgtgccacaaggggcaaaagacgatattcctttacgggataaggagaagcagatacataaagatttagaagatgatattgtttcttcgggtggagatatgacagtcttggagcttgtgaaaaaatatatttcacagaaaacaggcgtaaggcataatacagaagcaaactataaatttgttatcaatatcattgccaaagaagcctttggaaagaaatggattgacaaggtaaaactatcagacgcaaaaggctggctcattaaattgcaggcagacggtagagggtacagcagtattcattctatccgtggtgttgtaagaccagcgtttcaaatggctgttgatgatgatttgatacgaaagaacccttttgaatttcagcttgcaacggtggttgtcaatgacagcgtaacaagagaggctattacaaggaagcaggagagagcgtttcttgaatttgtaaagcaggacaagcactttcgtaagtattatgagggcatttacattctatttaagacaggacttcgtatttctgaatttgttggattgacgatttctgatattgatttagaaaaaggtgttatcaatgtcaatcatcagttgcgacgtaagcgtaatatggaatatattatagaggacacaaagacagacagcggtacaagacttgtgcctatgactgatgatgtaaaggcgtgttttcgtaagattattcaaaaccgtaaaaagctaaaatcagaacctgtgatagacggtaaaagtggtttcctgtatttagacaaaaatgatatgcctatggttgctttacattgggagaaatattttcagcatatttgcgagaagtataataaaatatataaacaggaattacctaaaattacacctcatgtttgccgacataccttttgttctaatatggcaaagtcaggaatgaaccctaagacattacagaagattatgggacattctgatataggagttacgctgaatacatacacgcacttggactttgacgatattcaaaaagagatgaaagaagtctgcaatcggtaagttgtaaagttgtaaaataagggtagttttacaacttattttacaacttttgactgcaaaaacatgagaatttataagaagatacagaaactacaagaaaaatgaaagttgtaaaaagcctttaaatacaaggaaatacgacgatttaaggagatataagaacatgataaaaatactattcatctgtcacggcactctttgaagaactccttaaaaagtcagtaaaatcaatacttggaaggtatttgtgtggaagaaataacccgaaaataacccatagatttttgtgtgagtgttacaagataaataattataatttagggatgtgacatgatgagaatgaaagctgtaagaattctaatagtggaatcttacagctttttttataaataaatttgaaagtaaaatctttacaatttggtatagcgtgttttaaatgtaaaaaagcagatagttctttacatatagatgtaacaaaagaggcgtttttgtgaaggttgtttatgaggtgaggtaagagtctttagtgggggtaaaatctttacatgtaatatcctgtgttcaaaaggtaggatttaagcgaaaaaagcatcgtgaccatgaggaaatataaaagtaaaaagtattctatgataaagtataaaggcttagaggagaatgtctcttctaagtttttttaataagaaagcagtttgggcgtttgcttttgaagttataataagtgtagtaaaacttacaccagatggaacaggataccgtactaagatgatatttgttaaagagaaactattgatggatagaatgtcggatattcagttacgatttttcaatatagggtgagaaagtttttttgatgaagtgtaataatatgtggttatatgctttgtagaaaaatccgtaggaattaaaattttttgttttgtggaaagattataattatgatatactgaaagaaaatgataaattagaatttgtggaggggatattttgagaacatacaaggataaagaggaattaaaagatgagataaataaaagctttgaaaagtatatctctgaatttgataatattcctgaatctttaaaagataagagaataatcgaagtagatagaactccggcagaaaatcttgcttatcaagttggatggacgacattagttttgaaatgggaagatgatgagaaacatggaattgaagtgaaaacaccatcagatatgtttaagtggaatcagttaggcgatttatatcaatggtttacagatacttactcacatttgtcattatcagaattgaaagatagattaaaagaaaatattacatctatccatacaatgattgactcaatgagtgaggaagaactatttcaaccacatatgagaaagtgggccgatgatgctacaaaagcagcggtatgggaagtttacaagttcattcacgttaatactgttgctcctttcggaacttttagaactaagattagaaaatggaaaaagatagcactgtaaatcccagcttattgaattaaaagagttaagaaaatttaaaattatgaaagtaagtattttctcttgcttctatattcattgatttaatgcaaagaaaacttggaaaataattgacaagtaaacttggtagtggtatattatgaatgtaaataaaacttggcatttaagaaaggggaatatcaatgaataaggaagaaattttagctagaagtaaaaaagaaaatatttatggagatgaacgtgaaaagagtgtgcgtacaaaacgagatgctttttctctttgggggcttactgttttaggcattattataatgttcattaaactattttgtatggagtctccggcagatataatttctattttgttttgtacatcaggattgggatttacctatgaagggattaaacttaagaagaaatggagtataatttgcggtgttgtatttttactattggcagtttactttttttataaattttgtatggggttattctaatggatgataaattggtattaaaaaataatttaaagagtgcaagaacagaaaaaaaactctcgcaatcggcattagcagaaatggttggggtatcccgaaatacaattagttctattgaaacaggacaatttaatccaacggcgaaattagcattgattatatgtatagcacttgataaaaaatttgaggaattattctattttgatgaataataaaaagttgactttgcaggaggtattatgatgaaggataaaaaaaattattttggaaatggaatttcagtcgggttatgtttaggtgtagtattcggaattattttagataatcttgcgttaggcatagcaattggcatatgtcttggaagttctgttggaacaattgtttataagaaaaaaacaaaagatgaataacaatttcagcttgtcgaactgaaaaacactgtaataacatgtgtaaaacaaaatgtaaaacaccccactgagtaggtaggactaaatactcctatgatttcgattttgaagtcataggggtattttttgtgcagaaaaataaaaaatttcttttttcaccctgtattttcccctctgaacctttcgttatatgagagcaaaaaaataaaattccttttttatttgtaaaaagccctctctacgttctgatatatgaggaacaaattacatttgccttaaaagaatcgggcctgattcaagaacaaagaaaaaacgaaaagagaaaggagaaactacatgaacaaaacaatcttaatgggaagactgacaaaagatccggaggtgaaatatctccaggatgaaaacagtactgcaatggcaagatacacgctggcagtagacaggcgatatcgaaaggatggaaaggcagaaacagattttatttcttgtgttacctttgggaagaatgctgagtttgtagaaaaatatctgcaaaaagggttgaagattttagtaagcggacggatccagacaggaagctatgtgaatcaggaggggaataaagtttatgccaccaacgtgattgtagaagaacattatttcgcagaagggaagaaactatcaggatcagaaaagaaagaagataccgatccagatggatttatgagtcttccggacggtgaagaacttccgtttgagtaagaaaaactcggatgctgaaagcagaagagcgcacttatataccttacaaggtatgtgcgtcttatggagtttgcatctttctgaaggggaattccgaaagtgtttgcggatgatccatccgaagaagggttccccttccggcagaaatgtttatcccgtaacagagaaaatggaagagttgaaaaaggagaaaaagaacgatatggcgaagaagaaaacatttcaggaatatacgcaggaagcacttcttgagattgaaaaaacagaagctgcattgaaacaggcaaagcttgaaaaggaacaggcagagcacaggatccagagatccttgaattatctggatacacagaaaaagaaaaagcgaaaggcacgaacccatctgttgatccagaagggagcagccatagaagcaatctgtaaagataccaaatatctgaccgaggcagaattttatcagttgatggatgaacttcttcatgatcccgcttgtaagttttgtgatgtcgttcatgaaatggttcgtggacgggcggaaactgcagaagcgaaggaacgagaattcgcagaagaggaagcactattaaaggcgatgcagcgaggtgaactgccacagggagatgagtaagatgggatgttatcactttcatctaaatcaattatccagaggaaaagggcagtctgccattgccagtgctgcctatcgagccggtgtaaaactggaatgtacgtattatggagaagtaagtgattatacgagaaaaggcggtgtggtattagcggagatccaccttccccaacaggctccggagagattcaaagacagagagaccctttggaatgaggtggaatggatcgaagggaataagaaagcacagctggcacacagctttgatattgccttgatgaatgagttttctatggaagaaaatattgagcttgcaagaagattcgtagaagaacagttagtcgcaagagggatgatcgcagatctagcgatccatgatccgaagaaagcaaaggataaaatacccaatccccatatgcacatcatggttcccatccgccctttacaggaagatggtacctggggacaaaaacaaaaaaaggttccagtattaacaccggatggacagacggttttgaatcagaaaggacaaccggtatttcgggcggtacatacaacggattggagcaggaaagaaaccttggaagaattgagaagtgcctgggcgaagatgtgtaacgaactgtatgaagaaaaaggacttacagaaagagtcgatgccaggtcttatgaggaacgggggattgataagatcccgatggtgcatgaaggaccgaatgtacaggcaatggaagcaagagggatttcaaccgcactgggaagtttaaaccgactcatccgagccttaaatgatatgaaagaacgggcaaagaatcttcttcaatggtccttgtttcgagaaagccaactgatggaacggatggtgttcttacatcagccaaccttagcggattatctgagaaactattgtgataagagaaatgcagttgcagaatcctacgcttatggaacacaaaaggcgaagaatacaaatctgaaacaatttgcagagacgatccgctttctggaagagcaggatgtgagaaccccggaacagctgacagagaagatccaggaattagatactcagctaaaagaggtaagtcagaggttgactcaacaactgtctgctctgcgaagtatcaacagcaacctttatgcaatgaaagagtattttgaaacgagacctgtttatctggaattaaagaacaaatattttggcagggaaaaattcaaagaggaacataagaaggaacttagcggatattatcgttcggaaagaatcttaaaagaaaatctggatgcgaatggaaaaataccagaaggaaaatggaagcgagaagcagatcgtttatcggaagagattgctgctttacgaaaggaagataaacggatccatgccatgttacgaaagtatgagaaagtcaaaaatcatgtggaagctttgatggcagaggaaggagaaggtgtctctcttccagaaacaaacaaacgggagcaatccacagaaacaaaagaagcagtgagaaccatgaaaccaaagaagaaacatcatggaatggagttataggaggaattttagaagatggaagaatatacaagagaacagattcaaagagcagatgatactgatttatatgtttttctttctgggagaggagaacagttcaaacgatgtgggaaggaataccgatggttgcgacatgacagtgtgatgatcaacaagaacgaatggtatcgttttagtcagaataaaggtggtcatgccattgattttatgaaagaattctacggtctttcttttgcagaggcagttaaagaattattaggagaagagggagctggagaaaccaacagaagaacggccaaggaagatgcaggcagacagaaggtctgccccatccccttgcctggattggaattgccagaaagaaatgaaagctgtgagattgcaaggaagtatctcattgagcagaggaaactatcggaatggctgatagatcagatgattgcaaagggggatatttatgaaagtaaaaactatcacaatgtggtattcgtcggaagagacaaagaacagaatcccagatatgcagctatgcggggaaccgatgagaaccgatatcgtggggaggcaagaggttcggaaaaagcctatggatttggccatataggaacggatgaaaaactgtttgtgtttgaatcccccattgatcttttgtcttatatcactgcagttccggaagaatgggaaaagcatagttatatttccctaggaggattgagtgaaaaagcaatgaaacggatgtatacagaatatcctcatatccattccatctacttgtgtctggataatgatgagcctggaaatgagagctgcaggcagtttgtttctcttattccggagggactgagtgtgtaccgattagaaccggtgaagaaagactggaatgaatgtctggtagcagaagttccggtagaaaatatggcaaagcagatgtgttggagagatgccagggaaaaaccagttccggtcctgaagatgtcggaggttgaggaaacggtggttcagtggttatggtatccattcattccctttggaaaggttactttgatccaggggaatccgggaaaaggaaaaacgtggcttgcaatggcaatcgccgcatactgtacgaatggaaaagaacttcccaatgcacttcccatagaaccctttaatgtgttgtatcaaacagcagaggatgggatagcagataccattaagcctagattagcaaaatgtggtgcagatatgacaagggtacgatttatcaatgaagataaaaaacagctttctatgacggacgatcggattgaaaaagccatccgacagaataatgtacgactcatgatcatggatcccatacaggcttatctgggagccaatgtggatatgaaccgggcaaatgagatccgtcccttatttcgacatctcagtacgattgcagagagaactggatgtgccattgttctcattggacatttgaataagtcgtcgggaagtcagagtgattaccgttccctgggatccattgatatcgcagcggcagtacgaagcatcttatttgtagaaaaggtggaaaaagagaaggaacaggatatccgagtggtatatcagcaaaaggattctcttgctaagaaggaaaatccggtagcgttttctttaggagaagaaggcttaaaatggttaggagaatacgatatatccattgaagatctgctgatggggaaagcaggaacgaaaaaggaaacgaaactggaaaaggcacagaagttgattctggagttattaaccaaacggaaagtaatgtgtttagaagaattagaggcagaactactagcctatgggatttcttccagaacaggaagagatgcaagaaagcaactggaaaacagattgagctacgactggtgtcagggaagaaaaacagttgcattaatcacagaataaaagatgacattggcaaaaaaatactttggcattggcagtctttatagatacctttgccagccgccaatgtcaaaaacaaagattatagaaggaggcatacaaatgacaagttatgatataccttattggaagaagtatacattatccattgaagaggcagcatcctattttcgtattggagaaggaaagcttcgtaagttagtcagtgacaatccaaatgcagagtatttgctttggaatgggaatcgtgtacagataaaacgaacaagatttgaaaaatttattgatacactcagtgcgatataaaatgaaatttaaaagaaggaggtgttcgaattaggggttacatgatatactaacaatatcatgttgcgtccccttggaggtaggatatgatttcaaagagacgtgatgataaaggcagagttctccagcaaggagaatggcaggaaccaagtggacgttaccgctataaatatacagattcacttggtaagcgtaaaatattatatagttggagattgacggaagcagataagatgccagaaggtaaacgggcagatctttctctcagggaaaaagaaagaaaagttcagtccttacagatgcaagggattacaggaagtaacattacagtgcttgaacttgtggaacgatatctttccctgaaaacaggagtaaagcataatactttagcgaattacaaatttgtggtgaatgtattgaaaaaggaagaattcgcttataagaaagtggatgatgtgaaactttctgacgcaaagatttttctgataaaactacaaagagatggtagaggatatagttccattcattccatcagaggtgttttaagacctgcttttcaaatggctgtggatgatgacttgattctaaaaaatccatttggatttgaattaggtacagtacttgttaatgacagtcagaaaagacaagctgtttctccggaagatgaaactaaatttcttgattttgtaaagaatgatccgcattataatcagtattatgatgcattttatatcttattcaagacaggtcttagaatatctgaattttgtggacttactgtaaaagacttggactttaaagaagatattatcaatgtgaatcatcagttgcaaagaactcgagaaatgaagtatatcatcgtatctacaaagacaacaagtggtactcgtttacttcctatggaatcggatgtaaaagaggcatttcttcggatcctgaagaatagaagaaaaccaaagcgtgagccaatggtagacggatatggaggatttctgtttctggacaagaatggaagaccaatggttgcacttcattgggaaaagtacatgcaacatgcaagagaaaaatataatcgtgagcatttgttgcaattgccgccaattactcctcatgtatgcaggcatacttattgtacaaatatggccaattcagggatgaacccaaagacactgcaatatctgatgggacattcagatgtatctgtaacacttaatgtttatacgcacaccggctatgatgatgcaaagaaagaacttgccagattaaaagaagcaagggatgaactggaaaagaaaaagtttataacccaaaaacatgcacaaacaactcatgtaagccttatctcataaggaatttgggactttaaaaataacccatttgtaccacaaatgcccgaaaaaacatgagaaaatacaagaatttataagaaaaagaacctttcaagtaaaaaatgcacaaaggctgaaaagccagtatttataaggctttgagaggatatgaggagataaaatggagaaaataaaggtactatttatttgccacggcaacatctgtactttacaatacaaacaggacaaagtaatagaattaatgtaggaataggaatataacagggaggagaataaagttgataagagtagcattcgtatgttggggaaatatttgtagatcgactctaagtgagagcgtatttacttacaaagtaaaggaattaggattggaggagttgtttaccattgacagttttgccacaagcagggaggaaatcggaaaccctccacacagaggtactgtaaacaaattaagggaagtgggaatccctttagtgcctcatagagcaaaacagattagcttagaggattacgataagtttgattatattataggcatggatgaagttaatattaaatatcttaataggatgttaaaaaatgatcctgatggaaagatatataagtttctttctttttcaggatcaggaagagatattgcagatccttggtacaccggggattttgatgagacatataaggatgtaattgagggctgtgagggcttcttaaagtatctgacaaagaatggagaattatactaaagataaaaacatgaagaggaatgaccgttttggatcattcctctttttttattttttcttcaatagcatcaataatataagagctaagactcataccggcattagtggcataggtctgatatagctctttcttttcttttggtactctaataccgataagactggtattttctttctgatattttgcagtagctcttttctgtgcctcagtgtatttagctcccatatattagcatctccttactatttgaggagattataacatacatttcttctgttttgaaagaaaaatgaggaataagtgaggaataaactcttgacatatatgtttaacatatattatattggtagtggtatatgttaaacatatacataaggaatgaagcaggaggacacaggaaatgaagaaaaattacaacgattatgcagtagatgagctggtagctcagtacaaacaggacaaaaatgaaagagtatttgcagaaatcatggaaaaaacaaaaggactgatttatgtatttgcaagaagctactccagatccattataggagctgaaatggaagatctaattagtgagggaaatcttattttatgggatgctgttcagacatttgatgatacaagggactgtagatttactacatatctttgtggctgtcttaaaagaaattacaatacattattttcaatgtgtaattgcaaaaaaagaaatcccggttgttttgtacagagttatgaacaactcaattctaactcaaaacatgaggaagatggaaacagcttgggaaattctgagttttctgtagagtgtgaggactatagcatgatagaggttagaagcttgcttgaaagtttgaaactttcagacagggaaaggcttgtagttaatcttttgatggacgggaacagtaagccggatattgcccgggaattgggtgtaaaaacaccatctgtacatacctatgtaaaacgtattggaaagaaacttatagcggctgggctttgtgcataaagggggattaagcaatgaaaagagcaacagaagatcataaaatctggttatttgatttagcacacggaaatcttacagagttagagattgtaaagggatttattaaattttatgctttaaatggttttacagtaggaaatgtacaggatgatttggtatttagaacacactataatccggtgcaaggtgtaaaggctcttaaagtggcattgaataatttttcggaggtggatgaatgacaatttatgaaagagttgagctgtataaaagcctgtatcagggctctacagctcctacaatcgtttctaagataatagctgatggattttataccttaacaggattagaggctctggaggctattaggaggcttaatacagaactctcagactattatcaagtatctatcccggtaataacggtgtgggtaagggatgataattatgtacaggctacaggagagatatatcttacagagccgaatttggagggatttttgcatcaattcaggcaccacctccagaacatagagaggcggtatgagaggagaggtctaacggctgagggagctgatcctaaatactggagggtaccctatgaggagtgtatgtgtaggatgccgggagaggatgatgctaaggcatgggctaaatttgttattatggtgtaaaaaaatgtcttgacaatttttgataaaaatagtagtgtaaattacaacagaaaaaaagcacccggttagggtgctatcagttcttactcagtgttaccagcaatgagtaaggatatagggtaaacgagatactctacaccaccagaggcaactgatttttcaccaattattataaagggttggatttcagaagtcaataaaattagcttaaaagagaaatcctaaatcatttcttttactgtatatttcgagggagctaaggtactgagtaatctttaccttagctctctttttctgttacaggattatacaggataataaaggataacacaggagctataagattataaacagtcttagtggctccttttttaattgaataatggtaagcggacagcgtaaccgctttataaaagcgtggtgttgtagagcctaaataataaatctacagggggagaatttggggcaccctactccagctcctcctcaatcggatctcatacaacttgaaaaccgatataaaacgaaagaagttgggctatggaagtttccaaagagagattgttacagtaaagcatggatggaaatgtgtcacgctccccctctggagtggctgtaatatttagctgaaatgctaaactatgtagggtactaagaaacctcaaaaaagagattcttttaggcatggctcccctcctttttcttaggagatctatgcctaaatttcctaaaaaagagattttctttatcatttacattggttaggaaatagaaatacatagaaaatgaatacaatcgacatatactatgaatatttatgcaatcattagagaaagaaaatgaaaaaaaatttaaaaaaggcttactttccgggaaataagcacgctatattatgaaagcataatgacaaaaacaattagcttattgtcaatactgggagaatttcagtattgatttcaggaaagaggtgttcagttatgaaaacgctttttacgatgggggagtgtatggaacaattatgcgtgtcacagcgaacagtacagaggtatcttgaaaatgaagagctggataaaattatagttaaaacaaaaaatggaagaaagcgttatatcactgtagaaagtgtagcaaaatttatcagaaaaagaagtcaggaggtaaaaaacaatgaataaagttgaattaatgatttcaaagaaaatggaggtttttaacaatattcccgtgattaaaccgagaaaagttgaggtaacagaggatagccctcttagcatgaggatcaacaagagtatcgaggataagattgagaagtctttagccagaacaggagaatttactgggaaatactcagcctctaagtatctgggacagccaatcagtgatattaaggctgaggaaagacgtattgataacattatcgcagatagacaggcaaagtttgattctttcaagaatgaaattatagacagctataaacataagggcatgaaaaactgtcattggacagaggaaagggctgaggagtatgcttgcaatactttcaggagcaatatagccggatcaggagcagaggacgagaaagagagagagcttcacaagaagtatgttgaaatggatgatgagctcctgagctataaagcagaaaagaacgctcttgctgtggcaaaagctgattacatggatcagaacgccgatctcatcaaagaagtacaggagaaacgccgtagagaggacttagaaaagagtggtttactggatgagttaggactctcagagccagctccagtagagtctgaggagaaagaagaaacagaaataaatgaaagcgaggaaaaataaatgagtgtaacatttagaagtaaacagccttatttacaggtggcacatgaggaactttttcatataggggaagttataaagccctgtgattattcaggaaattggtattcagaagaggcaaaattagaatttgagaaacttccggatccggacagagtaaatggctcttacttattttgtgagggggaaaaacataatgaaatcactttagagcgtgaggatgctatagccggaatgagagaatatatcaaaaaaagaggagattggctcattgtagaacttagtccagagggaaaagcactggaagagccgggagggactatttttgaatgtaaaaccccttggtataaccttactccggcaatctatacaggtaagactccggcagatggaaaaacttttgtttttaatcagggggaggggcagaaccgttatatcacttcaagtcttgaagaaatcaagctcctgagaggatatattaagactttagttaataagtctatttatgaggtgaaataatttttaggaggaaaaaaagatggatgagaaatatatatagaggagctggaaccagtgattcagacaccagatcagacagatcaggagtcggaaagtcttatggagacagaggagcagatcagggagagagtaagggctgaactttctcaggagtatgaaagatacatagatcagaggatcacacaagctcaaaagaaatgggagagcaagaaagcaagagaaacggctgagagcttagaccgtgtgaacaagctgagagccatagagtcacagaaacgccggaaagaactggagcttaaagagcatgagattgccataaaagagttaaggcttgatattgtggatatggttgctcttgagggcttagctacaggctttagacaggttattccttatgaggatctcttagctatcccagatccggcagaacgctacagagagctcaaaaagaggatcataaacctcaaggtagaattttataagctggtagatcaagaagtgaaaaaacagaccagttttctacaggtacagaaaagaggtatggcataatggggactatgtttgagataccgggatgggaagaatttactaaacgttgtcaaaatgttgtagataagtgggatgctaagaaagctctgttattagaaaaaaatgggtactatatgccaggctgagataaaggcagaaatagacagaggcgagcatgtagatacatccagattaattgatagtataagtgtttttgtaggaggaatacctcacgattatgtggaggtagggactaatgtagagtatgcactctatgttaatgatggtcatgcacagcataggagatttttacctgtatcatatctttctgttaaaggtaagaaaaaatatattgattcctctgaaaatattgggggaataatgttaaaagagcgttatatccccggtgcattttttctggagaagggtatgcaagcggctactcccagaatgaaaaggctgggggagagctttatggttcaaattggaagagagatagagggatctaaaatgtaaaagtaaaagtgaaaaggactcgattcttgaaaattcaggagttgagtccttttttttttctaaatgaggaggtgaaatagttgattgaatttggagcgaaacttgcgttaaaagataatatgattgctgtaattcagaagaatatacaggcacagaaaaaacttacagatcaggttaataaatccagagaggcacttggcaaactttcaaaaggtaaacatcaaataaagattgacggaacttctgctcaaaaagaggctcagaaaatatctaataaacttagagaacttagtaaagctattacatctacagtacaagtggagacaagtccagctcaggatcagataaaaaaacttttggaaaaattgaaagagattaaaagtaatcctgtttatataaaggctgaggcaaatgtacaggcggcaaaacggcgtttagttgaaataaaagaaaaactggacattatgaaaaataaggtagtatctcctatcattaagttgaaagataccgcaagcaagaaaattcaaacaattaaaaaagcgttatctgagattgggaataaggtagctacacctgtaattcgggctaaagatacggctacaaaaattatatctggagtagtcggtaagattaaggctttaggtaagagagtagcttctcctatcattaaagcaaaagatacagcaagtaagattattggatccgttaagggaaaactctcagctattggtagtaaaatagccgcccctcttatcaaggctaaagatgcggcaagttctgttatcaaaaagcttatggggatgctgggaacccttgcaaaaggtgtaacaatcggtattgctgtagccggagctggtgcggctcttgccgggaaagctatgggacagggtgcaatgttggaacagcaacagatttctattgagcactttgttggggtgaataaccgggatcagtcagcagaccagatcaaacagatgagtcaacagtatatggaggctcttagaaataatgccaacgctaccccgtttactacaaatgaggttatagcggctggtacaagggctgtaaatgtagcctcaggtaatactcagcaagctatgagcttgttaaaggttgctgaggatatggcggctcttaatcctgaaaaatccctttctgatgctatggaggctatagcagatatgaaagtgggagagacagaacgaatgaaagagtttggttttaagatttctcaggaagatattaaaaacgccggaggcgtggataatgttattgaaaatcagttgaaaccttactttgagggaggggctcaaaagcttgctacaagtgcggctggtttagcctcaactattcagggtaaagtgagctctattgtatctgatacaggattgaaaatggtggaaaaggtaaaacctttactccagacagctattgattttattgataaatcagctccagctattcaggcttttacagataagtttgctaatggctttggaaaggctgtagatgtggtaaatgatcttattacaggatccgggaaaatgtctggctcctttggtaagataggaggcttagttagtacagcatcaggattatggaaaagtaattttaatacattaaagacttctttcagcaatacggtaaattctgttcagaaacattcagaattattcggtaagataatgggtgtgataagtgatgtaggatcttcaaaattgaggtttttaggaagtacctttcgggcaattggtacggtagcctcaagtgcatttgaggggatcttatcggtagctgagagtgtgtacaatgcttttgagcctattatctcaggaattacagatgcagtatctaacgcttttgactgggctggtgagaatataggaggagcggctactacaatcagcggatttatcagtgatttgagctcaaatattagctctgttatgggatttttgtctccttacattgcctcagcgtgggaatggattaaaggggcatttgctcaggcggctcctgtaatcggacaggcggttgagttaatcggctctgtactctctgtattatgggatgcagtgacagcggtatttgatttcttagctccttacctcccggcaatatgggacggtatctgtggggcatttaagttagctggtgaggtaatctctacagccattacttttataggtacaatccttagcggtttacagtcagctttcacggctgtaatggacttcttagctccatatatcccctctatttgggagggaataaaaacagcctttaccgtagctggggacgtactgggtgccgtagcttctgtgatcggaggtgctatacaggctatctgtgatttcttctctggagatttctccgggctgtcaggaattgtcgaaactgtatggggagctatcactggtgcttttgaggttgcggctggaattatcggcggtattgtcgattttataggtggcataatctcaggaattgtggactttttctctggcggacttgagggagccaggggcgtagctgagggagcttggaacggtattacaggtatctttgagggtgccggaaacctcatttcaggggcagttgatacgatttcaggcataatctcaggtatagccggatttttctctggtggactcgactctctcggtggtatagctgagggagcttggtcagccgtgactaccgcctttgatacagccggatccctgatttctggggcggttgatggaattggtgcagtaataggaggtataggagaaactttctcaggtgctcttgatgctgtagctcctactgtagatggggcgtggacggctattacaggtgcttttgatacaggtaaagagttactttcaggtgctcttgagggggttggatctgtactggatggtattggatcaactatcacaggagctcttgagggcattggttcctttattggtgacacatgggatagtatttgtggatttttctcaggaggatctgaggaagtgggacagtcagctcctacagctcagactaatgtaggggcttacaataccgcttttgctcaaatgggtgcaatggctcctcaggtagaggcggcatggaatagcatatctacagcctacaacacaggtgttgagagtataggtactacgaatacagcagtaacaacagctcttactactttgagtgatgcgtttacaaaatcctttacagctattaacacggcagtaacaacaggatggacggctgtaagtaccactttcacaaatatgacaacaggatttaccaccttacagacaacagtttctacagggtggacagctattacaacagcctttaaaacggctcagacaaatacctctcaggttatgactactatgcagacagcacttactactttagctacagcatttaatacaaactttactcagattttgagtattaccgtatcaggctggagctcagtgttatccgcattttctgtagctcatagcggtatatccgctcattcaagtgcaatctccggcacgttatcctcattggctggctcctttagatcctctatgggaagtattataggatcggctaatagtgcggcggcggctgtaaatagtgcggcggcaagtatagcggcggctgtaagccgggcggcaagtgcggcggcaagtatgccgtctggaggcggtgtaagtcgtgcaatgggtgtagatcgtgtaccttatgacaactatcctatcatggcacatgagggagaaaagcttctcacaaaaagagaggctaaccagtatgaagcggctacttctacaagaggtgtacgtttcattagtagagcaatgggtacaggggagatccggcgtgataatactccgattttagcacatgagggagaaaaggtattaacgaaacaggaaaccagacaaggatacggtaaatatttagtagaaaaattagcggatactattgtaattcgtgaagagtcggatgttgatgtaatcatggagcgtatgcttagaaaactacaaaaaattcaggcaaatatggcttagaagagatggagcttattgtaatgaatgataataaggtgattcagttttatactcctcacaaggtaacacttgttgaggagtatattgactacttcatggtagatatgtttccgggaaaacaggtaagggaatccaataacggcaagaagataagaaaactcttggagttgttatttcaggcatatgaagcagtcggagaagagagaaaagattttttgaagcaaatggatgaggtgacagcaaatatggattatacagaaagtatcaacggtaagaaaacatggattattgccagagatagagtgagagaatatatacctcagctttttgtgtggtaattatctatgaaacgttatttttcagtaagtgaaacagcaagagtattagatgtgacggagaggactgtgtggaattatgtcagaaaaggagaactgaaaacggttaagaaaaaatacagaaaaaccgggagagatcggatctggatagaactacttagtttggaaaaatgtctgataagaaagaaatatccagtaatatacgggacaagggattatatggttagatatttcaaagaacagtatgataaacagttagaattaaaaattgcttttcaggaggttggcattatggcagaaaagggtatattagatggattgaactatttctccagaattggtgaggaggagctggatcaaattattgagaatggcacagaattatggaatatccgggatgtagcggcatatatggaggtatctcttagaacagtaaggagatatatcagcgagggaaaactaaaaccagaaaaaatatcaaaatccggggaaaagttgttttctaatcttgatgtaatggaattatatagagaaaagaaaggatgtcaaccagtatgtagtgaggaggaagataaagaggctatttatacatttattgaagaacatccagagtgcatacctattttcaaaaaggctattgatggtttactacagtaaaagaatttttgaactaagataaacgaaagttttgtttatttataataggaaagaaaaatgtgagctgtaaaagggagaaataaggcgttttgaaagtttttatgcagtgttttcagtagaaatggaggtttgagcaatgtttgcgagtagtagggagaacgttctttttaataaatttaaggagagattgatgggatgtgcaaggtatgagctactatccgaaaatcgaaaagtattacaggaattatctacgttagttgtatgttattggagacagaatatgccttatcaaatatcagaggcacaatatcactgggaagagaataagatccggaaattttcagaacagattcagccgggagaactggagttagaggcgaaagtggcggtaaaagaggctgaggagtatctgaggattataggaatgtacagggtgaaaagaaagtgcagagttttttaatggtatgcctaaatctgttgatccatgcagttattatattacagatacaaaataacaggatcaaacaggaggttacaggaaatgggagaaaacaagcgtagagattggatttctgagaagatggataaagcatttaaggaaagtctgtcagagaaagactatcaggttgttatgggacttagtaaatggtatgccccatactttacaggagaatcaaagaattccgacagttttcttatcaatattgcttatcagattggaaagatggaggggaagaaaagcaaatgaaaatgagattaaaagcttgcagagttcaggctgggatgttgattaaagaagtggctcaggctataggggttagtgagatgacagtaataaactgggagaaaggtatttcctcccctgaggtggatttagggctaaagttgagcttgatctataaaatccctttagaatatatggactttacaaaagatgggaataaggacaggaggaaaaaggcgtgagttataagaaactaaagattcctgaggatgggagctgttatatagttcctgtagagggaaaggatccagtatatattaaaattgtgaaagggattgtattttttgactatagaaatattttggacgtgtataagagtcttaaagggtttcatttagaacatgagtgtacggaagtatatagaaatcagaaaccgggtgatagccgggagatggttagtgttaatgctgtaatatctgctatttatcaattagacatgtcaccagtaattagagagcaaatatgtgtcagattattaaatgctccagttgttttagtatgaagagaggaaagcctccagagagttgtatataagtctctggaggcgatttttttatttacagcttaggcagtagagagatatactcagagaaaaggaaaggagctgagagggtgtataaggtagtaaagcattttacagagcctgtagtagatccagagactaaggaagaatatgaaagagaaagttatactctttccagcaaaaggagagtgagctgggatattaaggatcagaaatggaaagacaggtacaatagggaatatacacaagttcatatagccgggaaactggtgggattcaacctcaagaattctttgacagagatagataagaggatgctacaggagatttctggtgctgatccgaaaagtatagaagtaagttacattgattataaccgggaagtaggaggggagccttttggatttacaacgggtatgccagtagaggcagatcctgataagtatggaggaatttctgagatgtaccgggaatgtatcaggagaggagtggcatgggaggagcttttacaatgggatggacatagtgatgagttgcctatatgttaaataaaccactctcagttagaaaattctctccggcgttattcaattttcggaagtgcatactacgcacatccgaatttttaaccttgataacttgctttttgtcacagaagagccgtaacatagcctatttttgaacggataagttttgatagtaaattctaagcataaagcataaaagggttgtatggggcagatacagcgttacaagtgctatcctcaaaatgtgataaactgagggataagaaaaattgagtatcgtctaattccatgaagtgatgtggttattacttataaaatgagtgatgagcaaaataggaggaaacaggatggtacaggagaaattgagagcggtattttatgccagagtttctactgctgaggaggaacagctaaaagcattaccaaaacaggttgaggagtgcaaagatgttattgcttctaaaggctggaagttggtagatggttatgtggatgaggggaagagtggaactaaaacagatggtagaaaggcatataaaaaacttttagaagatatgcaacaggataaatttgaaatagttgttgtaaaatctcaggataggctacaacgaaatacttttgactggtataggtttacagatttgttaaataagaatgggaaacagctttttctttacatagataataaattctatgaaccatcagaggatgctcttataactggaattaaagctatattggctgaggaatattccagagatcttagtaaaaaacttaataatgcgaataaacgaagaatagagaaagcaaaagccggaggagctgtctctgctatgggaaatagccagatgtatgggtataggataatagatggaaagtgggttatagaaccagacgaggctaaggtagtaaagaaaatgtatgagctgtatttggaattagggagcataaaaaaggtaagagatgctatgaatgagcaaggatacagaaataaggttggaaaattgtttactgatgagggtgttgggagaattctcaagaatgaaaaacataaaggctgggttattcttaataaataccataggaattttgaaactaaaaaaattgatgaatttcctgaaaaagagtgggttatagtgaaagacgatcatgaacctattgtatcggaagaattatgggataaggtgaatgatactatcaaaagccatttgaataaagggcatgagaaagcaaaaggaaagaaatttgggaacgatcctcttagtggtaaaatattttgctcatgttgcggaaaagtgctatacaagcatacatcaataggatcttacagatcggcaagtggaaaaagggtaaagacttataaacattatcatcagtggtattgtagcagtaagatagccagaggagagatggcttgcagtgaacctgccactatatcaggagtacaaatcaataaatacttggtagaattggctgattgttttttggattatagcacaattgaatatagtaagaatcttttgaaaaagcgttctatagattggttaaaaaatttaaaagatcaattatcagtctctaatgataacaaaagtatagaagaagaaatactaaaattagaaaataaaaaaggaaaattgattgatctttatacagatgagttaattacaaaagaagaattcatggtaaaatcaaatgaactggaaacaaatctggaaaaaaagaaagctctcttagtacctgtagagcataatcctgatattgaggctatagaagataccataaaaaatatagatgctgagatagagtctttatttgatgatgaagctatggtaatggagaaaaaaatccagtttattacagagcatatcaaaaaggttgttgtctttggtaatagagatgtgtttattgtgttggatagtatggctggagcgtttctgtttttagataaagaagatgcaaggattgaaatagtgcctatggaagagtataatgcaagtgaactgagtgaggtaggtataacagaaaaagactttgtaccatttgatagggaaagtatgccgcagcaccatggctcaatacatcacgcaacatttagtaacccaatctggcatggaatttaatttttacattgattctgctgccaccagccgcgaggaaatcggcaaccctgtccactatggcacgcgccggaagttggaagcggaagggattttctgtggggatcatcgtgcccgacagcttaagaaaagcgactatgacgagtttgattttttaattggaatggatacacagaatatccggaatatgtaccggattttaggagaggatccggagcagaaagtgtacaagttgctagattttacagaacggaaaggagatattgcagacccatggtacaccggcaattttgatctgacttatcgggatgttctggacggatgcagagggcttctgaaatttatcgaagaacaggagagtgtttaacaaaaaagaatattttatgtaacactattgtggcagaggagaattatttatcctctgccacaatatcttccaacactttgattaagtcgtggatattttggatccgcacatttctttctaaaatagtatttttcagatttaccgataaggattcaaatttttcccgtatttcaggagcaatataagacatgtttctcacctcgtagataggataggcaaaaaggaaaggacctatacagttttcctgcaaaaagtaaaagaaatttattcagatatttacaaatggaaatgaaaatcgctataatattgtccagagtagagttgccttttcgggaactccttagaaaacatcagacatatatgagagaagtatttgaaagcagggtacaagagggctaccggaagagagaagaaaatagagtaatgggataaaaaacgttaaaacagaaggcatggactaaatgggagtgaagcatccactgatgaagatagagggcattatttttctgaactataggtagagcgaacttctcaaagcaggatagcagaaatctattttccctctgtactgatatttagaacaataaattttgcgtgtacaagatgtgcaggcggataagaaatagagaaaagaaagagagactgagcatgaaaagagaattggaattatatattcatattccgttttgtatgaaaaaatgtgcatattgtgattttttgtccggtccggctccgagggagacgatagatcgctatgtaacagcgcttgtggcagaaatcaggcagtatcaaaagttggcagagaattatcgagttacaacgattttttttggaggaggaacaccatcgattttatcgggaggtcagatgaaagaaatttttgatgcgctccgggatgtgtttgagatccaagcagatgcggaaattacgatggaagcgaatccgggtacggtcacaaaagaaaatttgcaggcatacagggcatgtgggatcaaccggatcagttttggactgcagtcggtcgatgataaggaactgaagctgctcgggcgtgtacatacgatgcggcagtttgaagaaagttatgatctggcaaggaaggcaggatttcagaatatcaatgtagatctgatctcggcaatcccagggcagacagtggcatcctgggagcacacattggataccgtgatccgaatgaatccggaacatatttctgcgtatagtctgatcattgaggaagggacgccattttacgagatttatggggaggacgcaaaagaagagcaggatagtcggtgtgagaaatgtttggctgatgacgggaaacagatggatacaggcaagaacttcccaaagcttccggatgaggaagcagaacgtcgcatgtatgaattgaccgcagagaagctggaagcggcaggatatctacaatatgaagtttcgaactatgcgaagccggggtatgcgtgcaggcataacaaaggatactggcagagggtggagtaccttggaatcggcactggggcggcatctttgattgaaaacgagcggtatcagcatatttcagatacggatctttatatccgggcaaatggaaagttggatcagatcgaggaggaaaaagagaagctagattggaatgcacaggtggaggagacaatgttccttggccttcggatgaaagagggggtaaacaagcagaaatttagagaacggtatcacagagaaatacaggaagtctatggagaggtattggaaaaactcaaagaagaaggattgcttcgtgaagaggagaagcgaatctgcctgacaaagagaggaaatgatctgagcaactatgtacttgcacagttcctgttataacctataaaaatgtttcagagagaaaggcaattgaaaaattttcagaatgagagaaaggttccggaaattttttgattgcttttttggattgaaagtttctaaaaatgtacataatctcgatagaaaatagttttttacaaaaaatataaaaaatatgtaaactaggttgacaaacgaaaagcatagtgctatcttaataatcgtaaggtgttagcactcgtaagaatggagtgctaataaagaaaacgaggaggtgtgagatgaaagcagatcatggattggatgatcggaaacttaagattttgcagacgatcattaagacctacttagagaccggggaaccggtgggatccagaacgatttccaaatatacagatttgaatctaagttctgcgacgatccgcaatgagatggcggatttggaagatctgggatatatcatacagcctcatacatcggcgggaagaattccttcagacaaaggatatcggctttatgtagatatgctgatggaggataaggagcatgagatcactgagatgcaggagaagatgcttcagaaggccgataagatggaacagcttttgcagcaggctgcgagagtgctggcaaatagtacgaattatgcgacgatggtttctgctcctacttataataggaataagttaaagttcatccagctttcgcaggtggatgccaatcagatcatcgcggtgatcgtcatggaaggcaacatcattaagaataagattgtgacggttgcagagccgcttgacaatgagacaatgctgaagttgaatatgctgttgaataccaatctgaatggaattgcggtcgaagatatcaatcttggcatgattgccagactgaaggaacaggcaggaattcacagcggtgtgatcagtgatgtgcttgatgcagtggcaaatacgattcagcttgataatgaccttgagatttacacaagcggagcgacaaacattttcaaatatccggagctgagcgacaagcagagtgcacaggagatcatcagtgcttttgaagaaaagcagcagttggcagaacttgtgacacagacgctggcaagcgatgagaacaaaggaattcaagtttatatcggaagtgagacaccggtacagacgatgaaggactgcagtgttgtgacagcgacttacgagcttgggcagggcatgcaggggacagttggaatcattggtccgaagcggatggattatgagaatgtcatgaagacattaaagacgttgatggtagaactggatgcgatatttcataaaaaatcataagaaaggtggtacgaccattggataagaagatgacacaggaagaaatggtaaaagaagccgtagaggaagcaaagaaagcggcagaggaacaggacgccgctcaggaagcagcgggagaagatacagaagcggttgcagaggaaaccgttgaggaagaagctgacagcgaagcatccgaagaggaagctttggaagagacagcagaagaaggttccgagaaaggagcaaaagggctgtttaaaagaaagccgaaaaaagataaaaaagatgagcagatcgaggaattgaaagataagctcacacgtcagatggcagagtttgataacttccgcaagcgtacagagaaagaaaaatcagcgatgtacgagatcggggcaaaagatatcatcgagaagattcttccggttgtagacaattttgagagaggactcggagctgttacagaagagcagaaagaagattccttcgttgccggtatggagatgatctacaaacagattatgacgacactggattctgtcggagtgaaagcgattgaggcagtcgggaatgaatttgatccggatttccacaatgcagtgatgcatgtagaagatcaggaagtcggggagaatatcgttgtagaagagttccagaagggttacacatacagagatacggtagtaagacatagtatggtaaaagtagcaaattaaaaattcatttaagatgcataaagcattttgaattttatcaacaatagatagagtaagtaaacttagtataaaatataggaggatttcatcatgggaaaaatcattggaattgacttaggaacaacaaatagctgtgtagctgttatggaaggtggacagccgacagtcatcgcaaatacagaaggagcaagaacaacaccatcggttgttgctttcacaaagacaggagaacgtctcgttggagaacctgcaaaacgtcaggcagtgacaaatgctgataagacaatctcttctattaagagacacatgggtactgattacagagtaacgatcgatgataagaaatattctccacaggagatttctgcaatggtacttcagaaactgaaagcagatgcagaaggatatcttggagagaaagtaacagaggctgttatcacagttccggcttactttaacgatgctcagcgtcaggcaacaaaagatgctggtaagattgctggtcttgatgtaaaacgtatcatcaacgagccaacagcagcagcacttgcatacggacttgacaatgaaaaagaacagaagatcatggtatacgacttaggtggaggtactttcgacgtatctatcatcgagatcggtgacggagttatcgaagtattatcgacagcaggtgacaataaacttggtggagatgactttgaccagaagatcacagattacatgttagcagaattcaaacgcgcagaaggaatcgacttatctacagataagatggcacttcagagattaaaagaagcagcagagaaagcgaaaaaagaactttcttccgcaacaacaacaaacatcaacctgccattcatcacagcaaatgcagaaggtccaaaacactttgatatgaaccttacaagagcaaaatttgatgaattgacacatgaccttgtagaaagaacagcagagcctgtaacaagagcgttatctgatgcaggaatcgcagcttctgaacttggaaaagtattattagtaggtggatctacacgtatcccggcggtacaggaaaaagtacagaaattaacaggacatgagccatctaaatcattaaacccagacgaatgtgttgcattaggagcatctgttcagggtggtaaattagcaggagatgcaggcgcaggcgacatcttattactggatgtaactccactttcattatctatcgagacaatgggtggtatcgctacaagactgatcgagagaaatacaacgattcctacaaagaagagccaggtattctctacagcagcagataaccagtcagcagtagacattaacgttgttcaaggtgaaagacagttcgcaagagataataaatctctcggacagttcagacttgacggaatcgcaccagctccacgtggaatcccacagatcgaagttacatttgatatcgatgcaaatggtatcgtaaatgtttctgcaaaagatttaggaacaggaaaagaacagcacattacaattacagcaggttctaacatgtcagacagcgagattgacagagcagtaaaagaagcagctgaatttgaagcacaggataaaaaacgaaaagaagcaatcgatgcaagaaatgatgcagatgcgatgatcttccagacagagaaagcacttggagaagtcggagacaagattgatgcaaatgaaaaagcagcagtagaagctgacatccaggcattaaaagacgttcttgcaaaatctacaccagagagcatgacagatgcacaggtagaagagatcaaagcaggaaaagaaaaattaatgacaagtgcacagcagttatttacaaagatgtacgaacaggcaggcgcagcagctggagcacagcaggcaggaccggcaccggaagctggaccggcaccagaaggatttaacggtgacgatgtggtagacggagactacaaagaagtataataagaccagataagtgcattacctgcacggattctgcgggatctgaagactcacagacagtgggaaatcaggtttcgcagaatttccttatgaaatgaaaggtagaagaacaatggctgaaacaaaaagagattattatgaggtgctcggagtagataaaaatgcagatgatgcggcgttaaagaaagcttaccgtgcacttgcaaaaaaatatcatccggatatgaacccgggagatgcggaggccgagaaaaaattcaaagaggcttctgaggcatatgcagtacttagtgatgctgagaaacggcgcaaatatgaccagtttggacacgcggcatttgaaaatggcggtggaggagccggcggatttggcggctttgattttaatggtgcggatttcggggatatttttggagatatttttggagatctgtttggcggcggccgcagaggcggacgtgcaggcaatggaccgatgaaaggaatgaatatccgcaaaggagttcggatcacatttgaagaggcaatcagaggatgtgaaaaagagttagatcttgtgatcaaagatccgtgtccgaagtgtaatggaaccggtgcaaagccgggaaccagtccggagacttgttccaaatgtggcggaaaaggtcaggtggtatatacttcccagtcatttttcggtacagttcagaacgtccagacttgtccggactgtggcggaaccggtaagatcataagagagaaatgtccggactgtgcgggaactggatacgtatcaaaccggaagaaaattcaagtatcgattccggcaggaattgacaacggacagagtatccgcatccgtgacaaaggagaaccgggaacgaatggcggtccgagaggagatctgctcgtagaggtaacagtatccagacacccaatttttacacgtcaggatatgaatattttctcaacagctccgattacatttgcacaggctgcgctcggtggagatgtgcgcatcagcactgtggatggcgatgtgatctacaatgtaaaaccgggaacaaagacagatacaaaagtgcgcttaagagggaaaggtgttccgtctctccgcaacaaacaagtgcgaggagaccattatgtcacacttgtgatccagacaccggagaaattaagtgcagaggcaaaagaagcgcttagaagatttgacgaactgactggaaattccttacatcaggaagatggaactatggaaaaatctgagaaaaagacaaaaccgaagaaaaaaggatttatggataagttgaaagaatcttttgaagaacagtcggataaataagtatctggcttcagaaaaaataacaaaaataggacagacagagagatgaaactctttggactgtcctatttgtctgtctgggaaagtgttttgtggcagtcatgattttctgtaagagacagtcgggatccggatgggaggaatatagaaattgtcccttttcatatagtaagcatagcggaaggtatctgcatcattgagtggtgaaaagttttcccatgcgctggaaaaggcagaaaaattccgggaaaggggcagaaaaatgtgtgaaagatttttgttaaatgaactagaacaaaatcagacaggggaagtccgtaaaattttatccgagccggagatgaagaggcgtttccaggacattggtctgatctgcggaacgaaagtgacctgtgtgggaaaaggaccttttggtgatccgaaggcttatgaaatccgaggcgcagtcgttgcgatccgaaacagcgatgcggagcagatcgaaatatgtccagaaagaatttcagagaagggtgtgtaaggcagatggcaaagcgaagagaaatgacaatcgcactggcagggaatccgaatgtgggaaaaagtacactatttaatgcactgacagggatgcatcagcacacagggaactggaccggaaagacggtaagcaatgccaaaggctattgcgagcgggacggagtgctgtatacatttgtagatgttccgggatgctattctttgatggcacgttccccggaggaagaggcggcaagagattatatttgttttcagtttccggatgctgtgattgttgtctgcgatggaacgtgtctggaacggaacctcaattttgtactgcaggtgatggaagcagcagatcgagtgattttatgtatcaatttgatggatgaggcggagaaaaaaggaatttccattgactttgaggcattggaaagcatgctgcagattcctgtgatcgggatgacggcgagaagtggaagtgggatggaacaactttttgaggtactggggaaatttgcggaaggaacaggggaaaaagacataaaagaagcgatcgtgtcgagaaaacaagcgtttgggcagattgaatatccggaagtgatcgagaaggaaatctcccatctgcttccggttgtaagagaagtgacaaaagggtgcttaaaggaacgatgggtagcggcgcggctcatggatcaggatccaggactgtgtcaggcaattatggattgtctgaatctagaattttcagaagcaatgcaactgaaaaaggcaggaatgcaggcagaaaatcggatgaaagaaacggagcagcgtctggaggatacaagagaacagatggcagaagcgtttgtcagacgcgcagaggagattgcagaaaaagtggtgagcactaaggaggacactggaaagaaaaagggacgaatggcagatcagatcttaacaagtaaactcatgggatttccggttatgattttactgcttttagtgatcttttggctgacgatcaaaggggctaattatccatcggaagtgctgagcaatttctttggtgcgattgagggatatttgctggaatggtgtcagagaggaaagctgccggcggctatctatgagccactgcttttcggggtatatcgcgtgaccgcatgggttgtttctgtcatgctgcctccgatggcgattttctttccgatgtttacgattttggaagatctgggatatctgccgagagtggcatttaaccttgacaaatgttttcattgctgtcatgcctgtggcaaacaggcgttgacgatgtgcatgggatttggatgcaacgcagtaggagtttctggatgtaagattatttcttccagaagagagcggttgatcgcgatgctgaccaactgttttgttccttgtaatgggaagtttccaaccattcttgtgatacttacgattttctttgcgggaaatcaggcagtttccgattggaagctggcattgcttctgacaggcgtgatcactcttggtatcgggatgacatttcttgtatcgaaaatcttatcggggacgatcctaaaaggggaaccttcgacgtttctgttggagcttcctccgtatcgcagaccacagatcggaaaagtgatcatccgttccgtgctggaccggactttgtttgttttagggagggcaatcatcgctgccgctccggctggacttttgatctggtgtgcggcaaatattacagttggtgatcagaccattctgatgcattgtgccggtttccttgatccaattggacgtttcatggggatggatggcgtaatcctgcttgcgtttttgttgggatttccagcaaatgagattgtactgccgttaatctttatgggatatctgtctcttggaaatctgacggaatttacagatcttcatgcaatttcacaggttttatatagaaatggatggacacaggtgacggcatgcagcgtaattttgttctctctgatgcactggccgtgtgctaccacctgccttactatttacaaagaaacgaaaagcaaaaagtggacgttggcgtccatactgattcctacctttgcagggatactctgctgcgcgctgtttgcacagatcacgaattttgtattgcggtaaatagaaagaagctatataatagcagtcagaggcgcgcaggcgcaaaatacaaaaagaatgatcagaaagggaaagaaaatgaaatacattttatttgaagcaggtccggtcacagtgtacagctatgggctgatgattgccctaggtgtgatcctgacctttgttgtggcacagaagagagcgaaaaattacggattagacccggatgcgattttctatatgggagcctgggggttgctggcgggaattctcggggcaaagctgttgttttatctgacagagatcaaggagatcatcaaagatccatcgctgctgttgaatgtatccgaaggatttgttgtatatggcgggatcatcggaggaattttgggagcatacatttatgcaaagataaagaagatagatattttggcttactttgatcttgcagttccgtccatcgcatttgcacagggatttggaagaatcggatgcttccttgcaggatgctgttatgggcgtgagacaaatgcatggtacggaattacgttccacaattctccgtttgcaccaaatgaagttgcactgattccgacacagttgatttccagtgtagctgattttgcacacttttttatcttgatctttttggcaaagcgtgtgaaacacaaaggagttgtcacagcgatgtatctgatcttttacagtgtcggaagattcctgatcgagatgttgcgaaatgacccgagaggaacgatcagcgtaatgtctacatcacagtttatttctatctttacgctggccgcaggaatctttatgtttgtgttctgccgcagaaagagacaaggagaagaaaaacaagaagcgtagtaattattttctcagtgcacagtctgcttccagaatggaaccggaggagggatccttcgtcttcagaagaatttcgcaggacggatttaccggatagaggagagggttgacggcaaaatcacggacgacaagctgtgaagccagttttgtaaggtcttcctcagactcgtagagagcttcgcttgcgcggtagccattttctaaaatgcggaaacgttctgcgctgaccagcatatagttttcaattgtattttggacagggagctggtgggccttcaggtagttgatcgtccggtgaaaggaagagcgatgtcatttcctcagaatagatggaaaggagctcttccttttcttctgtcccttggagaaggtgtggagtttttttgtggaatccagctgaaaatcggataacagtttcagaaatcgttccctgtcaaaaccgggatacatcttttcgtaaaaaaagagcatcatctgtggggtggcgccagggaaatagtattggtcatcggacagataaaaaatcatctgccgcactttggaagtatcagtaagtttttctccgtctatgaaaatttccccagaatccgcgttcaaaattccggcaagaatacggagcaacgtacttttccctgcaccatttgtgccaagaagcccgaaaatagcattgtcaggaatttccagattgacgttggacagagcagatgccgagcaaaatgtttttgtgagatgggaaatatgaatcataactattcctcctgtagttgtatcgaaagcgatttcgtctccggacacaaggcaaagccgcagaatagaaaaataaaatgtgacaaaaatattacaaaaatattacaaataaaattatacaaaatataccatcagaatgacaaagtgtcaataaaaatatgaaaataaaacaaaaagtagcaattataagcgaaaaaacatgctgtttcatgcgttataggaaaaacctgttgataaatgcgaggagaaagtgctacaataaaaagagtaatagcgaagcaatgggaagccatttttgtggcggactttgcggagatagagtaaggagagaagtagagatggcagaagaacaaaataatggttcatgttctccggaaagctgttccagctgtgcacatgcagacagctgtccaagcaaacagaaggagagcatgaaggtagctccaaatgagtatacccatgtaaaaaaagtaattggtgtcgtaagtggaaaaggcggtgtcggaaagtcgatggtgacagcttcgcttgcccgtatgatgcgcgaacagggatactctgtcggaattcttgatgcagatattacaggaccgtcgattccgaagatgtatggaatccatgagcatgcggtgggaaatgaactgggaatgtttccgtgtattgcgaaagatgagacgagaatcatgtcagtcaatcttttgttagacagtgaggatacaccggtgatctggagaggtccgatcatcgcaggtgttgtgacacagttctggaatgaagtattatggggagatttggattatctctttgtagacatgcctccgggaacaggtgacgtgccgctgactgtatttcagtcccttccggtagatggagttatcattgttacatctccgcaggatcttgtacagatgatcgtaaagaaagcctactacatggcgaagcagatggatgtgccggtacttggaatcgtagagaattatagttatctggaatgtccggattgcggaaagaaaattccggtttttggagaaagccatgtggaagagaccgcagaagaacttggagtaaaggtattagggaaaatgccattagatccgaagctggcatctatcgtagaagaagaaaaattctatgaagtgacaaatgattatctgaaagatgctgcagaagtattaatttcataaggaacagttacataggaagctgcgccgcttttcgataaagaaaggttgcgcagtttctttgtgcaaaaaacaaaacaagtattgcaaacgtatgttccttgtgataagataaaacaaacagatgttccgaacaaatgtttgaaaaaagaagggagaggaagagtcagatgcagggactgatactaggaaaatcagagatacaaaggagtatgaccacacagccgataggaagaacttttgggacagctccggcactctttggtgggcagaagtcactatatgagaagctgagtattctgtcagatgcggcgaagtatgatgtggcatgcacatctagtggaacgagtcggaggggtgatggaaacggactcggaagctgcgaaaaagcagggatctgtcacagcttttctgcggatgggagatgtatctcgcttctgaagattctttttacgaatgagtgtatctatgactgcaaatactgtatcaatcgtgcatccaatgatgtagaaaggacttcctttaccccggaggaggtatgccggctgacgatggagttttaccggagaaattatattgaaggattgtttttgagttcgggaatttggaaaagtcccaacgagacgatggagcagattgtgaccacactctggaaattgcgaaatgaattccactttcaaggatatattcatgtgaaggcaattcccggagcagatgagcgcctgattgcccgtgcgggatttctcgcagatcgtatgagtgtcaatttggagcttccgacagcagaggggctcaggcaacttgccccacacaaatccagaaaaaatatacttacaccgatgcggttagtacagaatgggatgtcagagaatcggcaggagattcagctataccgcagcgcgccaaagtttgtgccggcaggacagagcactcagatgattattggtgcgacaccagagactgattttcagattatgcgtgtggcagagtcactgtaccagaagtttgatctaaagcgagtattttattctgcatttgtacatgtcaatgaagataaggcgcttccggcagcgggggagcaggggcctcctcttttgagggagcatcgtctttatcaggcagattggcttttgcggtattatggatttcgggcggaagaactgttagatgaacaacaaccgaatttcaatgttttactggatccgaagtgtaactgggcactgaagcatttagagtattttccggtagaggtaaatcgggcggattattttacattgcttagagtgccggggattggttacaagtcagcggagcgtattgtaaaagcaaggagaatgggcagcctttcctttgaagatttaaagaaaatgggagtcgtattaaaaagagcgctatattttctgacttgtaatggcaaaatgtttggtcaggtacggatagaagaggattatattacaagaaatcttcttcagacaaaagagagcttgccggattctgtcagaaacatgaattatcgtcagttatcattgtttgatgatgtaaattttcgggaaatcaatcggatggacggaagtcttggatgtttagctgttttggatgagagtgaactaaaggaaaaggtggcaggatgaggactatttacgtttgtgaagatagcctgaccgggatcttttcaggcatctatgaggtgtggaagagaaaaatgacagcggaagaggcggggctggaagtgggagatagttttgaaagacgattgttctgcgaatatattttctgtaaggcggaggaaagaaaggcacttgctgttatccgcatgattcaaaaaaatcttggggcggacgtctatgagaaaatctcttatgcattgttatcggcggacagaagaaaggcggatatggtatttcgtgcaatgctcgaggcgaagaaattatctaggaaagatcggttgatggaacatttgggaaatgaggcagtcagagctgtttttggaatgtaccggcaggtggcaaacgaagcacatcattacaaaggttttgtgagatttcgggaattaaagaataagacactgtttgcaaaaattgagccaaagcatgcagtacttccgtgtattgcagaacactttgcagatcgctttccacaggaaaactggatcatttatgacaagacccatgaagtgtttctcattcacgagaaggggaaaagatattactttttgcagcagtatatgtgcatgaagggagcttctgggagtgctcagaagattgccggtggattttcagaagaagagatggactatgagacattgtggaaaggatttgttcagagcatcagtgttgcagagagggagaaccgcgcattacagaatcaaaatcttccgcttcgttttcgaacaaatttggtggagtttagtaaagaagaatggtcggattccccaaattttggagagttttctagttgactttctgagaaaatggtgacataatgggttccgtgctatacaaacaatccattggaaaggggtgttggtaatggaacagaaatggaagattagattatcagcaaatgaagatgtgagagactttgtaagaacagcagaaaaatgtgattttgatatcgatatatttcataatagaagaattatagatgcgaagtcgattctcggtgtgttaagccttgatttgacgcaagtattgacggttcgcttttacggaaaagatacagcatttgaagatgttcttcagagattttgtgttgcataatacatcacatcaaagttcacaggtggcgggatattccgataggagtatgccgccattcctgtatagaaatgtccatggataagaaagaggcggtagagagggatgagtgagacagtaaagatttctgtccggaatcttgtggagtttattttaagagagggagatatcgatcagcggcggacggcaggagcggataaagagcagatgcagcttggggcaaggatccacagaaagatccaaagacagatgggatcggattaccatgcagaagtacctttgaaaatggaagttttgtgcgaaggattcacactttgtctcgaaggaagggcagatggaattattaagcgggaagatgagattgtcattgatgagattaaaggggttctcagagagttaaagtacatcgaggaaccagtcgcagtgcatctggcgcaggctaagtgttatgcatatatgtatgcatcacagaatcatctggaagagatccggatccaaatgacatattgtcagatggagacagaggaaatcaagagatttttgcagacgttttccatagaagaattgaaaacctggatggaagatgtgatcaaaagatatgaaaagtgggcaaaatttcagatggagtggagaaaagtttccagagagtccatccgacagattcagtttccgtatgcataccgggaagggcagaaggaacttgcgatgtctgtgtatcggactattttaaggaaaaagaaacttttcatacaggcgcctaccgggatcggaaagacgatggcgacggtgtttccggcggtgaaagcagtcggagaagggttgggagataagcttttttatctgacagcgaagacgatcacaaggacagtagcggagcaggcctttcagacactgaaaaagcagaagctgcgctataaagtgatcacgttgacggcgaaagagaaaatctgtttctgcgaagaggcggtgtgcaatccggaagcgtgtccatatgccaaagggcattacgacagggtaaatgatgcagtttttgatctgctgacagcgacagacgatatgagcagatcaaatatagaggaatatgcgagaaaacatgaagtgtgcccctttgagatgtctttggatgtggcggtgtgggtagatgccgttatctgtgattacaattacgtgtttgatccgaatgcccatctaagaagattcttttcagagggaggaaaagaagactacttatttttgattgacgaggcgcacaatctcgtggaacgtgccagagagatgtacagcgccgccctttataaagaagagtttcttacagcgaaaaggttggtgaagggaatggaccggaaattgacgagaaaactggaaatatgtaatcaacagtttcttgtactgaagagagaatgcgagtcatatcgagaatacacttcggtgggccatatcgcagtcagcctcatgaacttgatggcggaactggagcgttttttggaagaaacagaggcagaggaagtgagggagcagttactggagttgtattttcatgtgagggcattcttaaatatttatgatattttggatgagcactatgtcatttatacagagctggaaacagacgacagttttcttctaaaattattttgtgtcaatccggcagtgaatctccaggagtatttatccagaggaaacagtactatctttttttctgcaacgatgcttccaatccgctactataagaagcttttgagtgtggaaaaggaagactatgcggtctatgcaccatcgccatttcaaaaagaacggcggaagttgtttgttgggacagatgtcagtacaaagtatacgagacgaacagggcagatgtatgagcggtttgcgtcctatattgcagctgcgcttcaggtgaagaaaggaaattacattgcattttttccgtcgtatcgttttctggaagaggtatatgagaagtttcagcgttatcagacggaggatgtcatctgcattgtccaggaacagtcgatggatgaagagaagcgagaggcatttctccaggcatttgatcaagatcggagcgaaagcctgattggattttgcgtgatgggaggaatcttttctgaaggaattgatctgacagaagaacggctgatcggggctttcctagttggaacagggcttccgcaagtgtgcaatgaacgtgaaattttaaagcaatattttgatcggaacggggagaatgggttttcttacgcctatctctatccgggaatgaataaagtgttgcaggcagccgggcgtgtcatacggacggcagaggacagaggtgttattttgctgttggatgagcgctttttagaaaggcagtatcaggaggtgttcccaagagagtgggatgattatgaaattgggacacttaagactgcagagaaaagtatgatgaagttttgggatcaggaaatgtaaagagagcatgggaagaagaaaaaatactcctcacttggatggtagattgggaatccaaatgaggagcagaaatatataagacgataccaatagctcttttaggttttaggaagagaccagtgccttagacttcttccagtggtgtaaagtaattgagaaattccagcgctgccttggaagaaggcacgtgatgattgtgcgcgatgacaagctgtcttgtcggaagttcttcatcagtttctacaataaaaagattgtcggatttgtgcggaatacagtagtccgggatgaaagcgatgccaagcccgatgcttgcaaggtcgatcaacagatcattactgctcagctcgatctccggtacaagatccagctggtgttgctggaacaggctgtgcaggaactcacttgtcgtacttttgcggtccagcattagaatcgggtattggaggagttctttcagggagagtttccgccctttcagttcactgaaagattcattggcaataaaaacatctttaaagtttttgatttttttgactgtagtcagactgctgagatagctgttcggatagttggtcacgatcagatcgacttgtccggtctcaagcagttccacacatttgatggaagtctggttggtcaccttgatatgtgcgtttggaaattccttgtggaagcgcttcaaataagggacaagaaaatagcggcagatcgtatcactggcgccgatgcggatctgtcctccggttgtggcagaatccatcagctgggattctccgcgcttgatcaaattcattgctggttctacatggcgcagcaggatctcaccttccggggtgagctggactcgtttggtactccggatgaaaagggtctgatccagctttttttccaaagctttgatcgactggctcactgccgactgggagataaagagctgcttggaagcttctgagaagctgagagtcgttgctacatagtagaagactttatataattcgtaattgatgtccatcattagttctccttataagtattttatatttataagaataagaggattttaggaaaatgtcaacagaagttttcgagaaagtaaacacagcatagtccatttttctggaattcgatgccaaaaactggtatacttaagaagaaagcatggaactatatttgagaaggatataatgtctggcagagagatgaggtgaagaatgcaaaaaatttttggtctggtggcggcaatggcgatgatcgtggtcatgttgatcacaagttttgaaatcgcaatttatagcgattatggatggtaccagaaggaatatgagaagtatcaagtactggatgatctggagatggagatgcaggatgtgatggatgtgactgaagagatgatggcatatctgagaggagacaggaaaaatctggaagtaaagactgtgatcgccggagaggaagggatgttctttaatgaacgggaaaagcttcatatggaagatgtacaaggactgtttctcggaggaatacagatccgcagagtcgcctttgtgattttcgcagcagcagttttgctgattctttttcagaaaggaaatttaagagagattttacctcagatgtatggatgggcagtcagtctgttccttggggtggcagcagtgtttggagggttggtcgcgattgatttcaataagtatttcgtgttgttccacaagatcttttttaacaatgatctgtggctgctggatccggctacggatttgctgatccggatgctgccggaaggatttttctttgatatggtgattcggatcggagtgattttcatagggagtctgttaattctgtggggtgccggggcactctggagacggggcagagcaaagaaaaaatcatagcattaatatttcttataagtaaattaagttatattaattatactaatgatttgaattgtggtaggatacaaatagaagaaagtatcagacgaaatggaggatattatgagtagtgtaaaacgtgtatatgtagaaaagagaccggaatttgctgtgcaggcaaaggaattacagcacgaagcaaaaagttatcttggcattcagacaattacaggaatccgtgtgctgaaccgctatgatattgagaatctttctgacgagacttttgagacagcctgcaatggtattttctcagagccgccggtagatattttatacagagaagaattcccaatgaaggaaggaagcagagttttttccgtagagtttcttccgggacaatttgatcagagagccgattcagcagtacagtgtgtacagtttatcaaagaagatgagacaccagtgatcaagactgcaacaacatatgtgatcgaaggagagattacagatgctgaatttgaagcgatcaagagtcactgcatcaatccagtcgattccagagagacagggatggacaagccggagacacttgtcacagtgtttgaggaaccggaagatgtgaagatttttgacgggttcaaagagatgccggagacagaattaaaggagttatatgattctcttgggcttgcaatgacgttcaaagatttccttcatattcagggatattttaaaggggaagaagacagagatccaacgatgacagagattcgtgtgttagacacatactggtcagatcactgccgccatacaacattctccacagaattaaaagaagttacatttgaagatggagattacaaagaacctctcgtaaagacttatgagagatatctggaagaccgctcagagatttttaaagggcgtgaggacaaattcgtatgtctgatggatcttgccctgatggcaatgagaaaactcaaaaaagaaggaaaattaaatgatcaggaagagagcgatgagatcaatgcgtgcagtatcgttgttccggtggtcgtagatggaaaggaagaggagtggcttgtcaacttcaagaatgagacacacaatcatccgacagagatcgaaccatttggaggagctgcaacttgtcttggcggagcaatccgtgacccgctttcaggacgtacttacgtttatcaggcaatgcgcgtaacaggtgcggcagatccgaccgtatctgtgaaagatacgatgaaaggaaagcttccacagaaaaaactggtgacagaggctgcccatggatatagctcttatggaaatcagatcggacttgccacaggagcagtcaaagagatttaccatccgaactatgttgcaaagcgtatggagatcggagcagtattaggagctgcacctagaagagcggtgatccgtgagacatctgatccgggagatatcattgtactgctcggtggacgtaccggacgtgatggatgcggcggtgcgactggttcttccaaagtacatacagaagaatctattgagacatgtggagcagaagtacagaagggaaatccaccgacagaacggaagattcagagactgttccgcagagagaaagtcagctgcctgatcaaaaagtgtaatgacttcggagcaggtggagtgtctgttgcgatcggagaacttgcagatggtctgcgggtagatttagataaagtaccgaaaaaatatgcagggttagatggaacagagattgccatctcagaatctcaggaacgtatggcagttgtcgtagatccgaaagatgtggcacagttccttgcatatgcgaaagaagagaatctggaagccgtggaagtggcagttgtgacagaggaaccacgtctggtactttcttggagaggaaaagagattgtcaatatttcccgtgcgttcttagatacaaacggagcacatcaggaaacagcagttactgtggaaattccggacagagcgggaagccttttcgtaagagaagaagtaaaagatgtcaaagaaaaatggatcgcaacattaaaagatttaaatgtatgctcgcagaaaggtcttgtagaacggtttgatggttccatcggagcaggctctgtctttatgccacacggtggaaaatatcagatgacagagacacagagtatggttgcaaaacttccggtgcaggaaggaacttgtgatactgtgacaatgatgagctatggatttgatccatatttatctacttggagcccatatcacggagcagtctatgcagtggtagaatccgttgcaaaaatcgtggcaaatggtggagattacagtaagatccgtcttacgttccaggaatacttccgcagaatgacagaagatccaaagagatggagccagccgtttgcagcgttgctcggtgcatatgatgtacagcttggtctgggactgccgtcgatcggtggaaaggacagtatgtccggaacgttccaggatattgatgttccgccaacattagtttcttttgcagtggatgtggcacacgaccatgagatcattacaccagagcttaagaaagcaggaaataagttagtatggcttcggatggaacaggatcattatgaacttccagtatatgcaagcttaaaagatcagtatgcaaaatttgcagaagatatccacagtggcaagattgtttctgcctatgcgctggacagacacggaattgcagcagcggtaagtaagatggcatttggaaatggcatgggtgtaaaactggaagaaacaattgataagcgtgaactgtttgcaccggcattcggggatctgatcgcagaagtaccggcagaaagacttgaagaactttctatttcttatacactccttggagaagtgacagcagacaacacaatctcctatggagagatgcagcttagcttgaatgaagcagtgactgcatggaaaggaactttggaaagcgtattcccgactgtttcagaagaaaaacaaaagatgcagaacatcgatgtgcagccggcatctgaaaaagcagtgatcgaaaacggactgtatcgtacaagtgatatccatatctgcacacataagattggacagcctacagtcttcattccagtattcccaggtacaaactgtgagtacgacagtaagaaggcatttgagcgtgcaggggcaaaggtgatcacaaaagtattcaagaacttaaatgcagaagatatccgtgactctgtagcagagtttgagaaggcgatcgcacagtcacagatgatcatgttcccaggtggattcagcgccggagatgagccggatggttctgcaaaattcttcgcaacagcattccagaatgcgaagttaaaagaagcagtggaaaaattattgcatgagcgtgacggacttgcacttggtatctgtaacggattccaggcattgatcaaacttggtctggtgccatacggaacaatctgtggacagacagagaattctccgacattgacatacaatacgatcggacgccatatttccaagatggtatacaccaaagtcgtaacaaataaatcaccatggctgcagcaggcagaacttggcggagtttacacaaatccggcatctcatggagaaggtcgctttgtagcttccgaagaggtattaaaacagcttttcgcaaacggtcaggtggcaacacagtactgtgatcttgatggcacagtgacaatggatgaggaatggaatccaaatggttcttactgtgcgatcgaaggaatcacaagtccggatggacgtgtgcttggtaagatggctcactcagaacgaagaggaaaatcggttgcagtcaatatttacggagaacaagatctgaagatcttcgaatctggtgttgcatacttcaaataaataacgaagaggaaagtcaaagtgaaaaattgcttgacttttacagagcataacattataatgtcaaagtaaacaaggcaatgaggccgcgcaggagtttttctgtgcggctgattttatatctgaggaggtaatgaagatgtcatatgtagatgaagtcattgagttagtagtgagaaagaacccggcggagccggaatttcatcaggcggtaaaggaagtgctggaatctctcagaattgtagtagaagcaaatgaagagaagttccgaagagaagcccttctcgagagattggtagagccggaaagacagtttaaattccgggtgccgtgggtagatgacaaaggacaggtacaggtgaacactgggtaccgcgtgcagttcaacagcgcgatcggaccgtataagggaggacttcgtctgcatccatctgtgaaccttgggatcatcaaatttttaggattcgagcaggtatttaaaaactctctgaccggacttccgattggcggaggaaaaggtggatctgattttgacccaaaagggaaatcagatcgggaagtgatggcattctgccagagttttatgacagaattatgtaaatatattggagccgataccgatgtacctgccggagatatcggaacaggagcaagagagatcgggtatctgtttggacaatacaagagaatccgtggtgtatatgaaggcgtgctgactggaaaaggattaagttacgggggatctcttgcaagaaaagaggcaaccggatatggtctgttatatttgacagaggaaatgttaaaactcaacggaatcgaacttgcagggaaaactgtagcagtgtcaggtgcgggaaatgtggcgatctatgcgacagaaaaagcacaggaactcggggcaaaagttgtgacggtcagcgattctaccggatgggtgtatgatccggacggaattgacgtagcagcattaaaagagatcaaagaagtgaagcgggagcgtctgacggaatatccaaaatatcgcccaaatgcgaagtatcaggaaggaaccggagtatggtcagtgaaggttgatatcgctcttccatgtgcaacacagaatgaactgcatctggaagatgcaaagatgcttgtagcaaatggctgtatcgcggtggcggaaggagcaaacatgccgacgacaatggaagctaccgaatatcttcagaagaatggtgtgctttttgcaccgggaaaagcagccaatgcaggcggagttgccacatctgcgcttgagatgtcccagaatagcgagcggttaagctggacctttgaagaggtggacagcaagctgaaaggaatcatgatcaacatttgccacaatatgacagacgcagcgaaaaaatacggtgtggaaggaaattatgtggcaggtgccaatattgcaggctttgagaaagtagtagatgcaatgaatgcacagggaatcgtgtagaaatccggcagtttagtaaaatgtaaaaaagttctaggtgcaagaatataaaaattgtgctaatataagagtattgataaaagaaatctgacaaaatagtgtttgggagggaagcacaatggaattaaagttgaaagatttacgttcatctaagaatccaaaggcgcgtatcaaaatcctgcaaggacattttgcgacaggaaattcacacatcaatacctatattgatatgtctacagtgaagacacggcacaacaatgcccgcgaagcggcaaaagaacttgcaaaggaatatttgacgacaactatggtcgatacgatcgtctgtctggatgagacggaagtaattggaacatttctggcagagattttgtcggacagtaccacgatgtccatgagcagcaaaaacaatatttctgtaatcacgccggaatttcatcaggcaggacagatcgtgttccgggataacaagcagcggatgatcaaaaatcaacaggtattgatactggctgcctcagtgacatcagggaagaccatttccaaagcgattgagtccgtgctgtactatggaggcagtgtctgtggaatctgttctattttcagcgctgtgacaaaaattgcgggaatgaagatcaatacaatttttacgagcagcgatgttccggattaccgggcatatgctcctcatgattgtccgatgtgcaaagagggaagaccggtggaagcgattgtaaacagctacgggtactctaaggtagattgatgatctggtgaggaatattgggaggaaaaaagagacactggaactaattattccaatgtctcttttagatatacagaccattctaagatcagtcgttccagggaatatgccgcattggcaggactggtagaagggagccggatcgctttttgtctggtgagaggcagacagtatttttcataaagcttaaaggcagtaccgccgtttgtgtagatctgccgaatcggagcatcccgcagaatcctggagatgtcatttgggatcacattacggatactgctgtcactggaaccttcaatctcgcaggaggcgatgacatcccatactgcaatatggttcctgaaaagaaatgctttcttgtctgcaatcgtaaccggaacatcctcatgagaaagcgctgccaacagcttccagaagcgattctgtggatgatgatagaagaactgtgcttcccgggatttgacagaagggaaactccctaagattaatatttgtgagttactgttataaatcggtgaaatgttatggattgcatgttccatagaagaaacacccctttcgcataaaagttgtaagttcagatttattgtagcatttggatgaagagggggcaatcaaaaaatagatacggaaaagagagggaaagatagatgacaatgcgagaattttgtgaaaagatcggaatggatgaagcatccatacagcaggtagaacagttttccatagaggatacggtgtataccagttacaaaagagagtttcaagaagacaaaaagaggttttttgcccgcttaaaagaggaagaaaactggcatgtgtttgcacttgtcctttatatccgcatggcagtggaagtatatgaaacctttcaggagaaaggaattgctgaccaggtttattttgatacgttttccgatttccggatttggaatgaggaatgcaaaaaaaagtatggtatttgtggactgacggagtgtgagtggctgagccttccgctggaattaaagatcttccggcttggcagacttcagtttgaaccaatccgtctggagaaagcgattgagacggagaagtataccttaccggaaggaacaaaagttttaaatgtacatataccggaagatggaaggttagatatagagacatgcatggacgccttcgagcgggcagaaaattttttccaggaaacattcgaggcatttgtctgtgagtcctggttggtttccccgaaattaaaggagctgttaggagaagattccaatattataaaatttatggggctatttgaaaattatgggattgtctatccgttccgtcaggcggaacagcgggtgtttggggtaatttgcgaacaaaaagaggaatatccagaacatacttctttgcagagagcattaaaaaaatacgttctgaatggaaaggaaccgggaatgggacaaggggtgcgccttcgcgcagagaagcgaaactgatcacggagtcagaacaattccgtgaccagttctgctattgctacaccagttctgcgatacgggaaacaccaacataaatctcggagattttataccatgtccgatagtctacggttcctgttgccggaagaccgaagaccgattggaatttttttacagatgcagcggtggctggtccatagatgccatctacggtgatcttcggaatggccggataagcacctgcaatgacatttaattcctcctgcatctgtcgcactttattgccggaagagccgttttctaacacatatcccggccaggaagaagggatgccggaaatctcctgtgcggtattgatatacatattgtcaccgtaataataacggagaatttcgattggggaatagccctggtctccaagcgctttcgatccccattgggtcatccttatggaagcgacatgcaaacgacttgaaaagccggcagccacagtattttacgaatctgggagatggtagtaaatcgtaaggacatcctgcggtttgtcataaaccattttctggatgatacttctgagcacctcgttcttctgtgaatctgaaaaggtctcagaaaaaagcacatcgcagatggtgtgaagcttctggcaggcttgctcttttttgggaaaatttgccggcgaagaaggctggtaatcgctgagacgtagttccagctgtttctgctcatttctaaggagctctttgttttctttgtattcttccaaagtatcaatgccgttttgataggctgccttgattcgcttttctttttgttccagttgctttaactgttcggataagagttttcgctcatcaaccatttcttgttttcgtgtcggttcccttttcatataagtgatttcctttgtgtggaaaacatcctgcaatgcttgaaggacaacgggctccaatagaagagaactgacactgtttttggcagtacatttgcccttgatgacaccataacaaacaaaataggaataggcttctccattggatttccgatacatcgttttggcgatcatagtgcggccgcataccggacattttaagagcccgccaagccagtggtggtaagtagaggaagggcgggctctttttggcatgtgggcagaatgcaatcgctgctgggcgcggtcaaacaattctttgctgatgatcgcttcgtgcagcccgttggcaatgatccagtctttctcctcattgatttcatttgtctcgcttgtcgtccgattccagcggatcatgccgcagtaggttgggttttgcaggatatactcgatcgatctccgctcaaaaggttccttccgggaagttctatacccgagttgattcaaaaatcttgcaatttcaaagcatccacaacattcttccacatacttctgaaagatgatccggatgatggcagcttcctctgggacgatcaccggaggttttccacgctcggtaatcttatatccgagtggcggtcgcgcctgatatccgccgcgcagtgctttttcggtcattcctcgtttaacttcatccgagagacggatggaatagtattcatccatccactcgatgatccgttcgatcagagagccgaaaggaccgtctaccagtggttcagagacacttaggacatcaatcccgcactgtctgcgaagcaatgatttatagacgatggattcttcctgattgcgggcaaaacgactatacttccaaacgatgatgacagaaaagggacgaggctttgtcttggcaagaccaatcatccgctggaaatcatggcgcttttctgcttttcttccggagatgctttccataaagatgtattcttccgggatggtgatattatttttttgggcaaattctttcccgagccggatttgtgcatcgggagataattcatcctgattatgtgtgctgacacggacgtataatgcgccgattttcatgtgcgatcactccttctcttgattatatatgcaaaaagagagaaaaataacagacaacctcgcatgcgggacaggctgtgctgcatatcttttggaaagaaacgcggggagagaaaagaaaagtgaaagtaagacagatccttgtgatggatgataaagagatcgacttggaacagttaagtaaagaagagcagaaacaggtggaagcgcgattgaatgcggcagctttgcgccaggcgggatatgagccttcgccgagacaaaaagatccctagatttttgtgcaaaggctatggtataatcatgagagagttctgtattaataattagcagaaatagataaggagaacatgcggatgataaaaagaaaattagcggcagaggaaatacagaaaatgaaagacgggtatattcctgcaccataccagctggaagagggagaacagatcaatgatgtttacctggaaccagtattttttgaaaacgaaaacggaccgacaatcggtgtgacgacatgtggggtgattgtgaaggatggattgttttttaaagatatggacaattctggagaactgtcaccgtacaaggattggagactggatcatgagacacgcgccaaagatatggttgcgcacttgcggttagatcagcaggcaggtctggtgctgaatacattgtggaattccccgatggtgatgacgcgcgaggaggcaaaagatgagaagggagagatcatcccatcgaagattttcaagcggtttgatccagaagaaaaagagggaccttcgtttcttccgggtgtcacgatgaatgtcagtgatgcggacgtactggaacggaaactgacgggcggagtgtacaggggtgatatgcgtgcagaagcgggcatgagtgcactttaccacaatttaggtacacagatgctggagtatgaggcatgtcaggatggcgtggcgattccgtattcgctgcatacgaatccaatcaacatcggttatccggatttcctcggaattggtgcagccgtgatgggagatggtaattttgatcttgtatatgagatggcggatacggatcgcaagatgatgaaggcagcagggcaaaacattatgtatggtcctcaggtagatgtggcgacagatccaagatggcctcgcaatagtgggacatacggggaacgtacggatatcacttgcggaatcatcaaagaattggttcgtggatatcagaatggagaagatggcctcaacgaaggatctgtcgtgatcacggtgaagcatttcccgggagatggaccggcagagaatggatttgagccacatatgccaatcgggcagtggagactttatccgacggagggatcgatggaaaaatatcacctgccgccatttcaggctgcttttgatctgaaagcatcggcaatcatgccggattattccagaatctgtgcagatagccgcagcaaagagcagtattatcgcggaagactgacttcgcgtgagacggttggttctacttacagcaaagaactgatcacagatcttgcccgcgagacaatgggatttgaaggatatgtaaactcagattcaggaattacgacggtacagacatacggggtggaagaacttacagtaccgcagcggtatgcgaaggcgatttctgccggaacagatgtaatcggaggaaattcagactctgaaaatatcgtaaaggcagtggaagaaggctatcttgcaaaagaagagttggatcgcgctaattatcacagattacttagtctgttccgcgtaggacgggtggacaatccatatctggacccggatcatgcagacaaggttcgggaggagaatctgcacgatgcgaaacaggcggcatataaagcgaatcagaaggcagtcgttctggcaaaaaatcatgcaaacgtacttccgatggaacagggcaaaaaagtttacattgcatgcttcaaaggagtggatccgggagcagctcttgcgcaggccatgggcgctgccgtaggaggaaagggagatgaagaagcatttgcagcgcgactgaaggagttgttcgcagagagaggattctgcgtgatagatgatccaaaagaagctgattacgcatatctgcacgtgtggccaatcagcaacggaatggtctttcgccagtatgcaatgccggtgatcgagatggtagatgaagaattgtttgaggaaagagaagtcaaccaaagccagaagaaaactggaaagatggttccgatcacgacattgaaaggggtatcagagattccgaagcttgcagaaatggttcatcaaaatggaggaaaagtgattgcgacctgcgtagtatgtaatccgtggatccttgataagttagaaccatatgttgacggactcacgttccagtatacggtcagtccagtggcgatggagaatgcgctgggagcacagatggatgttctctccggagcgtacaatccaactggaaagatgagcctgacaatggtatcttctccagaggtgattcgcatcgaagaaaaggaactggatggcgttatgcgggaagtatgtgtttctccaaatgatgttccgggatatgacaaagatgcatatatcgatccggagattttggcgaacgtgaagggcggaagttacgcatactgcgatgaagatggtaattactatcggtcaggatttggtttgagctattagtctcatcatagaaaaagtaaaaagcggcagggggatacacaggtcaggtgtatccttctgtcgctttttgggaatgagaagttttatcaattattttaaggagggaactatcatccccatattatgccggataaaatccgcttgggctgtcgtttagattgatcataatattcttttgctggctgtaagcatcgagaattgccttgtcattctcgcggccgatgccggattgtttgtagcctccaaatggagcgccttccggaatctgattgtatgtgttgatccacatacggccagtttcaatacttcttgcgacgcgcagggcacggtggatatcttttgtccagacagctccgccaagaccatagtcagaatcatttgcaagggcaatgacttcttcttctgtctgaaatttaatcacgacagctactggtccgaagatttcttcctgtgcaacacgcatatcattggtaacgtctgtgatcaatgtcggctggatgaagtttcctttctcacatccatgtccggtataagagtgaccgccacatgcgatggttgccccttcctgtttcgcagattcgatgcaggataagattttctctgcttgtcgcttactgatctgagatcccatctgtgtctcaggatccagcggatcgccgatagttactttctggaatgcagtcacaagttctgagacaaaccggtcgtaaatcgattcgtgtacgaagacgcgggatccggcacagcatacctgtccctgattaaagagaataccaagctgtacgccatcgatggctgcatcccagttacagtcgtcaaagatgatgttagcactttttccgcccagttccagtgtagccgggatgagtctttcggcagcggcaacagcaatgtctcttccaatctctgtggatccggtgaaagcaagcttgctaagtcccggatgctcaagaaggtactgacctgattttgaaccagaaccagtgataaggtttagtacacctgccgggagcagatcctggatcaattctgtaaatacaagcatacttaacgatgtctcagaagaaggtttaaatacgatacagtcgccggctgcgattgcaggagcgagcttccatgctgccattaggaatgggaaattccacggcacgatctgtccgacgacaccgattggctcgcggagcacaaggctcatcatattgccgtctaaaacagaggcagttccttcgtctgtgcggatcaaacttgcgtagtagcggaaatggcggatcgaataaggaatatcgatcgtggaagtttcgcggatcggttttccgttgtccatcgtttccacctgtgccagccattctttattctcttcaatgcagtctgcgattttttctaagataagtgcgcgcgcctcttttgtctgtgtcttccactctgggaaagctttccacgctgccgccacagcagcatccacatcttcttgtgttgcttgtgcacactgtgcaagaatttctccgtttgccggattggtacttgtatagactgctttgtctgaagcgtctctccattgtcctccgataaataatccatagtgttcttttaatgtatgtttttgattgttcataaaaattacctccaaaattcaattcaaaatcaattgctgtcaccagcgctttacttttgtctgcccttagtctacaatagaaactgataccttgaaataaccaaaaaaatgtttttataggagaccagattttgcttatttatgatttggaacagagagacggaaagtcgaaatatgaatatttgtatcaatgtctgaaggaagatattttgaacggaaaacttgcagagggtgaaaaaatgccgtcaaaaagacaacttgcaaaggaaaatggaatcagtgtgcggaccgtgatcaatgcgtatgaacagctgcagatggaaggatacctgcagtcgagggagcggagtggatattatgtggtatctgattttgattcacctttaaggtaccagaagattacaatccccgatccgactccggaaaaagaagaaaaatgggtggcagactttgcctcaaatacaacagtatacgagaaatttccattttcgatgtggacgaaagtcatgcgacaggtgcttggggactacaatctgcatctgatcatgcgtggagaatttctcggaagcccggaacttcggtatgagattgcaaaatatttgtatcacaaccgaagcatggtagtatccccggactgtattgtgatcggaaccgggattgagtatttgtattcaaaattgatcgggctgcttccggaacatgcagtgtatgcggtggaaaatcccggatacagaaaaatccggctgatctatgaagaactcggagtaaagtggacttggacggctatggcggaaaacggaattcatatgggaagtctgcgaagcagccaggcaacagttgtccatacctcgcccgaacaccattatccgcttgggacggtgatgtctgcaagacgcaggcaggaattgctgaagtggctggaggaatcggaagaacattatattatagaagatgattacgactgcgagttccgctataacgggcattcgattccggcgctttttggtctggatacaagcgggcgtgttatttatatgaatacgttcagtaagacattaagtcccgggatccggatcagctatatggtgctgccgccaaagcttctggaacgttatgtgaactcggcaaactttttttcgaatacttcgtcgaatctggaacagcatacactggcaagatttttgcgtgatgggtattttgaccgccatctgaaccggctgcgtaagtattatctaagtcagggagaaaagttgaagcatgcaattgaatgcacaccgaccattccggtggaagaaattgtcggaatggagacgggcacgcatctgctcgtaaaacttcatacagagcttcccgatgcggaagtgaagcggcgggcacaagaaaggggaattcatctttgctgtctgtcggagttttgtatcgaagagcagaagcggtacgaacatatgctggtactcaactattctggcatggaagaagaatggatgcaggaggttgcagagcttcttggaggagtgtttgattctgagattgcagagaagcgggaataaaaagcagaggggaaaggattgacggtatttcctgtgaattgtataataaaagcgccaaggttgcaaataagaaaaataggatataggtaaaagagatgaagacgatcattattggaattgcaggtgggaccggatctggaaagtccaccttcacaagaaagttaaaaaaagaatttaaagacgatgtggcagtgctctaccatgataactattaccgggatcaaagtgatattccgctggaagagcgccgtaagacgaattatgaccatccggatgcgatggagacagagctgcttgtcagacagctgcaggagttaaaagaaggaaagacgatacagtgtccgacctatgactacacacttcacacaaggtcaagcgaagttgtgactgtagagccaaagaaagtaattttattagaaggaatccttgtcctggcagacgaacggctgagagatctgatggatatcaaggtgtatgtagaggccgatgcagatgagagaattctccgcaggattattcgtgatgtcaaagagcgtgggcgcgatatggaaggcgttgtggagcagtatcttacaactgtcaaaccgatgcattatctctatgtagaaccgacaaggagtactgcagatatcgtgatcaacagcggtatgaatccgatcgcctttgaactggtgaaaaatacgattcagaagatactggacgaagaggcgtagatacagatctgtaaaaagaatgtggaaacagatgcaaaggagtaaatgggaaagatttatacaacgaggtggacaatgggacggggaatattttatacgatgatcgggtatgtttccgggagtgtgttatatgcaaaagtatttgggaagctattctgccagaaagatgtgacggaagatacgattgacgggaatcccggaacgacaaatgcatttctaaatggaggaatatggtgtggcatctgcacgttgttgtgcgatcttttaaaaggaattttgccggtgtatgcttacatgcatggactgccgggggcagatatctggattacgtttgtgctggcagcaccggttgccggacatattttcccggtatttcatcgttttcgtggaggaaaagggattgcagtttctttcggggtgctgctcggactctatccatatatgaaaccagtgctgctgctggcaagctgttttctcttattctcctttgtgattgtgatcacgccgaattatcataagacatttgcgacgtatctttttgcgacgattctcgtattgttttttggaaaaaattcttacgtcagcctgggaatgattctgatctctgcgctggtacttggcaagctgatgctttgccgggaagaaagagaggaaattaaggtgaaactattatgaatgtactgattttgtcttgtgataccggtggaggacataattctgctgccagatccatccagaaagaactgatccggagaggacatcaggcggtctttttaaatccatttgaactgtccggaaagcgcgttgcaggagcggtaggtggagcttatgtaaaattggtccagaagcatccgcgggcatttgggatgctgtataagctcggggcatttgtaagcagactgcccggcagatctccggtttattatgcaaacagccttgtggcaaggcatctggcaaagtatctggaacagaagtcttacgatgccattgtgatgccgcatctgtaccctgcggagatgatctcctacttaaaaagaaaagggtggaattgtccgaagtcggtctatgtggcgacggactacacctgtattccttttaccggggagacggagtgtgattattatgtgatcccccatgaggagttagaactggaatttgtccgaaaaggggtaaagaaacagaagcttcgcgcatttggcattccggtagatgagacattttgttccaaggaaacgaagcagcaggcacgagagaagcttgggatgagcgaggatggcatctactatctcgtagccggaggaagcatcggtgccgggaaaatccaacagttgctggatctgatgcgagaagcactggaagaggtggagcaggcagtggtgatctgtggaaggaacaagaagctggagaagaagcttcgcaagcgctatgccggttataaaaatatttccattataggaagtactgaccagatggcaacctatatgcgggcatgtgacgttctctattcgaagccgggaggactttcctccaccgaagcggctgtgatcggaataccgttgatccatctgacaccgattccggggtgtgagacaagaaaccgcatttttttccggaaacatggcatgtgtcttgctccccgtatgatcgaagatcagttgcttgcggggcggaaactgatgaaaaatacaagaccggcaggaaggatgatcgaaaatcaacagaatactgtaccggcagatgctgcagagcgtatttgtaatttgctggaacagatgtaaaaagaataagagaatcgcccacagaagatcaatcatgtacggatcttctgtgggcgattctcttctgttatgattttacgatcgtggaaaaccgctgctgtaatggagtttgtaatcttccgtaataaatacggcctccgtatccggaagatcttcgatgaatttcataccttcttcgagaccaagggaaaagcaggcagtgctgagtccatctccgtctacggattttttggacaggattgtgacggacacaagtgagttgtcataagggtatcccgtttttggatttaacaagtgatggtagaacttgccgtctttttcaaaagaacgctcgtagatcccggaggagacaatggatttgtcccgcacctggattgtcgacacggtctcgcttcgttttgcaaaaggcttctggattccgattccgaaagcatctccatccggcttttctccgacacagaggacgtttccaccaaggttgatcacggcgcttgttaccccatgctctaacagaaattcttttattttgtcagcgatgtagcctttggcgatcgctcccaggtcaagctgcattccctcctgcaaaaactggacacggttttcttttacaatgacctttcgataatctaccagcggaagtgcagcagagatctcggcatccgacggcaccaccttttcttcagaagtaaaatcccacagagcagagaccggaccaatggtgatgtcgaaggctccgcccgatttctcacagtaggagagagcggtagtgagcagttctgtcatctccggtgagatacagaaaaaaccgtcttcctgtggaagaagaccgtgattgagtaggtagagctcgcttgtcgggagtgtgcggctgaacaagttttcgtatttgtcgcagagatcgatcgcttctgcaagcaggttctcatctgtagagtcatagagcgttacagtgacaacggtattcagtttaaaagcagtgtcagaaataggagcttttgcagtttcatccgttcccgaagattgctttttctgctgctgaaaagagaaaagcaggagcagcaggaagacaagaagcacaattcctgtctgaagtattcgtctgtgaaagttagtcattgcttctatgagcctccttccatgagtagaggagtgcatccgaagattggatcgcatagtcagcaatctgttcataaggaatctttagcccatcgtggaaccatttccggatgattccaatgattccgcagacgcggaacgtatagagataatcaaaagagtccggatcaaatgcatcgcagctttcttgcatcaaagtgcgactgacatcgtattgcagtgcgaacagacgctcgagaaatgcatcttccgaatgaaggatcagtacacggcaggagtccatgttttcatagagaaaacgaaagatatcacagatcagtgcacggttgtccgcataaggtttctgctgttgggtaaacagtgccatctgttcgagaaaatcgtcctggacttgccgatacaatgcaaagatatcttcaaagttcgaataaaatgtagtgcggttgacgtcggcagtctcacagagcttctgtacggtaatcttggagagcggctggtcgaccagtaatttgagcagagcttcctttagtactttttgggagtaagctctctttcgatgtaatttttcctgttgcataaaaacacctttctaaacattgaaaaatggtttatttgtaaatcataacacaaagaaaggaaaacgacaaagaaaaatagaagaaaaacaacagatatagggaaagtgtcggtttcaaaacggaatgtccatgattgttgattgaacggaaaaatcggatatgctatgataaaacaaattgataggaaaaggagaagatatcatgagaactgtaatggaattaaataaaaactggtattttcaaaaagaaaatgtcggacttccgcaggaacttccttgtgactgggcaaaagtagatctgcctcacacatggaacgctgtggatggtcaggacggaagaggagaatactaccgcggagcatgctggtatgcaaaaagctttgagacaccagagtgtatggatggataccgtgtctatgtagaagtgctggcagcagcattgtccggacgtgtgtatgtaaatggacaggaagtggcatatcacgaaggcggattctctactttccgtgcggatgtgacagaagcattgcacgcgcagggagaaaatcttcttgtgatcgaagtggacaatggagagaagagccacatctatccacaggttgcagattttacattctatggcggattgtaccgcggtgtcaatctgatccttgtgccggaagttcattttgatctggatttttatggagctccgggactgaaagtaactccggttgtcaaaggaaaagatgcagagatcaagttggaatcctgggtgaaaaatgcagatgaaaattatactgtcagataccagatcaaagatgcagacggaaacgttgtagcagaaagctggagaccggcagagcagccatcagtcgttcagttccttccggatgcacatctgtggcagggtgtggaagatccatatctttacacatgtacagcagaactggtacgccgcaatgaaacggtcgatgaggttactgtacgttttggtatccgtgaattttatgtcgacaaagaaaaaggatttttcttaaatggaaaaccgatgaaactgcgtggagtttccagacatcaggataagctgtatcagggaaatgcactgacaaaagaagatcaccgtcttgatgcggatctgatccgggaagttggagcaaatacgatccgtcttgcacactatcagcacagtcaggatttctatgatgtatgcgatgagtatggatttgtcgtatgggcggagatcccgtacatcagcagccagagcgatgatccggcggcacatgaaaactgccgtcagcagatgaaagatctgatctatcagaactacaatcatgcatgtatctgcttctggggaatctcaaatgagattacgatccacggtgagaaaccagggcttgtggacaaccacagagatctcaatgcccttgtcaaagagctggatccgaccagactgacaacgatggcacatgtgacattgctctcccaggacagcgatcttcacagtgtgacagatgtagaaagctataatcactatttcggatggtacggcggaaaatatgagcagaactctgtatggtttgacgattatcataagaaatatccagatcgctgcatcggactttctgagtatggtgcagaaggaatcattacttatcagccggatgagccgaagtgcagagattactctgaggcatatcaggcagagtaccatgaattcatggtgaaaatgttgatggagcgcgactatatctggagcagccatgtatggaacatgttcgacttcggttgtgcagccagagatgaaggtggagtggcaggaagaaataacaaaggtcttgttactatcgacagaaagatcaaaaaggaagcattctacttatacaaagcatactggagcagcgaaccatttgtatacgtttgcggtcgcagatacgcacagagagccggggagactacaacggtaaaagtgtactcgaaccagccggcagtgcagctttatgtagacggagaattatttgcagagcagagcggagagaagatttttgtatttgaaggagttccgcttcacgaaggatttacacagatcactgcaagatacaacgattgcacagattctctcgcacttgaaaaagtagcagaaaaaccggagatctacacacttccgaagaatgaagatgaggaaggaatggaaggagcagccaactggtttgatcaggcggcagcagaagcggcaaacgcaggcgagatggtattcccggaaggatatttctctatccgcgacaagatcacagatatcattgaaaatgatgaggcggctgcaattctcagcggagctttatctgcaatgtctggtatgaaattaaacaaaggaatgttaaagatgctcggcggaaagacattagaagaaatgatccagatggtaggacagatgggacaggaaattccggagcagggcgtaaaagtcttaaatcttcagttaaataaaatcaaaaaatagatcagaattcgtgaaatgcatttgcgaaatcagaaagagatgccggtggacaaaaacaagaccggcatctcttttttgattgggggataaatcaccgtttatgcgaatggaaatatttaccataaaagcaggaaaatacttttaaattataatcatttaaaacaaactttttcatgccaaaacaaaaccgggtaggggtacttgaatttcgtgaaagaatgtgctatatataatgttatatattatataggaaattacaaatgagaaaagagtgggaacatgaaaaaaacagaaaaacatgcattgacagtccggatagctctgcttgtgatgttagacattttatttatgcaggtggcatcttttgccagtctgtggattcgacatgagtttgactttcaggctgtagaagagacgtttatccataccgtatggagatatatgccgctgaatattttggtgacactggctgtattctccatgtttcatctatacaccagcctttggaaatatgcgagtatcacagagttatcctgtatcgttgctgctgtggcgatttccagtctgctgcacgttctgggaatggcagtgatgggacttgagatgtttaaaagctacctgttgctatactttttacttttcttatccatggttgtgggattgaggttctcttaccggtttttccggtttgtaagaaataagtgtaaccgtggaatggcggagaagcgggagaatgttatgatcatcggagccggtgatgcgggggctgcgatcatcaaggagaatcgcctgagcaaagctgctacgagaaaggtctgctgtctgattgacaaagatccgaagaaatggggaagatatattctcggatgtccagttgtcggtggggcggacaagattatggaatctgtagaaaagtataagatccagaagatcgtcatcgcaattccttcggcgacaagccagcagatcaaggaattggtggagatctgtaaagagacaaaatgtgagctgaagattctccctggaatttaccagttgattgacggagaagtcagcatctcacagttgagagaagttgagatcgaagatctgctcggaagagaaccggtcaaggtggatctagaggaaatcttaggatatattcagggaaagacggtgcttgtcaccggaggaggcggatcaatcggaagtgagatctgtcgtcagcttgcgggacacggcgtgggaaaattgatcatctttgatgtctatgagaacaatgcctatgcgatccagcaggaattaaagagaaaatatccaaagctggatctggaagttctgatcggctctgtcagaaatacaagccggatgaacgatgtgttcgccacgtatcacccggaaatcgtatttcacgcagcggcacacaagcatgtcccattgatggaggacagtccgaacgaggcaattaagaataacgtgatcggtacttataagactgcgaagatggcaagcgactacggagtgaaaaagtttattttgatctctacagacaaagcggtcaatccgaccaatattatgggggcgagcaaaagactctgtgagatggtcattcagacgatcggaaagaagagtcagacagagtttgcggcagtccgttttggcaatgtccttggaagcaacggaagtgtaatcccgcttttcaaagagcagattaaaaacggaggtccggtcactgtcacacacaaagacatcatccggtatttcatgacgattccggaggcagtcagccttgtacttcaggccggagcttatgctaaaaacggagagatcttcgtactaaatatgggagagccggtgaagatcgttgatcttgccagaaatctgatcaagctgtcgggatatgaaccggatgtagatattaaaattgagtttaccggactgcgtcctggagagaagctttacgaagagcttttgatggatgaagaaggaatgcagacgacggagaacaagagaatcttcattggaagacagattgacgtagatgaggagacctttgagaaaaatatcgaggcattggatgaagcgtcccggagagaagataagaacattcgcgaacttgtacacaagatcgttccggaatatcgatatcaggcagccccaaaatagagcgcttcgtgtgcagggcaacatgtagtaaaaaagtggggcaaaaggatatttacaaacagaaacagatgcgatatactgttttcgtatatagaaattataaagcaattcatatttcgaatgaaatatccgtgtaaatatgagatgtgtgtgatgtttggagggaaagaatatgaggaaccaaaagaaatttgctgcagtattggccgcaggtgtacttagtgcctctatgtgcatgccggcattggcagcctcaggagtcagcgcagaagagcagaagattctgaataagatggaaagctctgcagctggatttggagtgacagatgtttctctgtatgcaagttattacagtcaggcagagagctggctcgcttccggagaagtggatctgacagcgagtcaggtagatgcagtgttaaaggcaatcgatcaggcagctggccttttacagcaggcaattgatgcgaatggcgctgcaagtgcaaaagatttgttaaatattatcggaaaaaatggtattatgcagatcgcacagcagattgtagatgcgattgcaccgggactgaaagaagtcggaatcattatcacagcggacatgctcgcaggagacaacggtgtgatcaatgtaaagcttgcaaaagacggtacaactatcggatcttctgacaaggtgatcaagaagactggtatgaatgccggagcaacgtatgcggtagcagccggatttgtgatggctttggtaggatgtgctgctgtggcaaagaagaacaactatagagagactgcagaggaatgctagattgatgaaacagcgtaaaagcagaatagtggcatatgtgatcgtgccactattctttaccatgataggttacggagttgtatatgttgcggcatccccgtttataaatatagtaacgactgcaggcagcatgtttatgactgagagccttcctgaattttctgaggaattgggctctattttttcggaaccagataaagatgcagaggcggaagaaatcccgcttgcggatgtaacctggccgaagtttggggagcattatgcaaatgtgacttgtgagcagattggtctggatgtaccgctctactacggtgacagcatggaaatcatgcgtgtgggagccggacagtaccagggcagctttatcccggggtatggcaagacgattttgctcagcgggcacaatacaacctacttttctccgttacaaaagattgcagtgggagacgaagtgacaattaagacaagttatggaatctaccgctatcaagtgcgggagacgaagatcttaaacgaatctgatccgcaggcagtagacctgcttcagaagaaagaagaactggtcatgtatacctgttatccgtttgacatgctgtcaagtacggatcagcgtttctttgtctatgcagacaaagtgagtggaccagtattaaaataggaggaagaaagatggaatatcagaaaataaagaaacagtcttcctccaacagaaaaggaagaacgatcgtgagcatgatcctgtcctttttgatcgcggtgacactgacaatggcagcgcttcttggaagtctccggttagggtttctgaatgagaagatgatcgttcgcagcttgaatgtgaaggattattatggagtagtctgtgatgatttttacgagcgagtggaagacttatccattcctcttgggattccgaaaagtgcattggaaggaattgtagatacgaacagtatgtacaacgatatccgggcgagtctggaggcatctttgaccggacagacttatcagccggataccgggaagcttcgaacaaagttaaaagagaatgtagaaaactatgcaaagtcccgggaaattgagctgggggaagcacagcagacggtactgaatacttatctggaacaggcagcggatcaatatgtaagggcaacgaagattccttttattgaatattatggaagaattcacggttttgcagagaaagtaattacagttggcattctcggttgcatagtctttgcggtgctggcaggatttgtattattccggatgtatatttggaaacatcacgcgatgcgctatcttgtgtacagtacacttgcatcggggctgatgatcggtcttgttccggcgtatttgctgcttgcacagggctatcggcggcttgtgattgaaccggaatatttgtaccagtttatggtgacttatgtgacgaacggtctgttgatctttgagggatttgcgatagggttctttggaattgctgcattattattactgcggattgcaagtttgcgaagacggctaatcaaaaacagcagaggatagaaaaggtgaggtgaacatagatgaaagggctgattgatattcatgcacatatccttccaggcgtagatgacggagcttcggattttcaggaaagtgtgcggatgttaaaaagtgcatatcggcagggggtacggtgcgtgatcgcaacgccccactatcatcggaatcactttcaccgcaacccggaacggaccatggaagctttgcagaagatccgcggatggctgcgagaacatctgccggatatgatcgtacttttggggacagagatttattatacaatcgattttgcggaggagattgccgcggggaatattttcccgatggcaaagagcagatatctgcttgtagaattctcgccgctggaagattatgcgtatatccgcaatgcagtgcacgttctggtcaacagaggatactgcccgatcatcgcacatgccgagcggtatcgtgtttttcatcaaaatgtcagcagagtttccgaagtgatccaactgggagcctatatccaactcaatggagacagcatcgtagggaaaaatggtctgcggatgaagctttttgctcagaagctgatgaaaaaggaactggtgcactttgtggcatcggacatgcaccatatggaatcgcgcaggccgaatctgaaggaatgtgccgaatatatggaaaaaacatatggatttgcgcgtacaaaagaactgctgtatgacaatccacggaaattgattgaaaataaactcatagaggaactgtgacagagaaaagagaacatataggagaaaatgaatgagacaacgagaagaacagatagaagaaaacgggatcgatctgctggagatgctggcagttctgttagataaagcgtgggtcattattctggtcggtgtactgacagccggagctgcattcggttatacgaaatttatggttacaccaatctaccaggcgaccacacaggcatatgtattgacaaaagcggaggatgcagcggtgacatcgggagacatcagcctcagcaatcagttgctcggagattgtgcctctctcttaaagagccgaccagtcacagataaggtgattgaggaacttggactgaagatgtccagtaccgcgcttgccaatgcaatcacggtgacaaatcaggagaatacactgattttaaatatttctgttagtaatccggatccatatcttgcgaaagaacttgcggatgaggtgagagaagtgggagcagaacatgtgacagaggttatgaacttaaaagcattgaatacagtacaggaagcgttgatcccgtcaagtcctgcaagcccgaacattatgaaaaacactgtggtcgggggcatagtcggagtcgtgctgacagccgggatcatcttgttaatctttctgatgaatgacaagatccgcagtcaggatgatgtggaaaattatttaggaatcggtgtactgggggcaatcccgtccacggaggacaagacaaagacgaagaaaaagaaatagaacacaagggagaaagcgatgcaaaagattaatttggtcataccagacaatatggactacagaacaagcgaagcatatcgcaccttgagaacaaatgtattgttctgcggggaagagatcaatgccattgcagtgacaagctgcacccctggagaagggaaatcagaagtatcattccggctggcagaaagccttgctgagacagacagaaaaattctttatatcgatgcggatcttcgccgctcggtattctcaaaacgatatcaggtcacgcaggaagtaaaagggctttcccactatctgtccggacaggaagaactgggggcagtcgtatgtgctacgaatatttctaatctgcatgtcatccttccggggccggtaccgccaaatccatccgaattactcgggaacgagcatttcagacagctaatggaaaagacacacgcactttatgactatattattattgatacaccgccgcttggaagtgtgatcgatgcagcggtcatcgcgaaagaatgtgacggggctatgctcgtcattgaaaatgatgcaatcagttataaaatggcacagaaagtagagcgacagctggaacgatccggatgtcggattctcggggcagtgttaaataaagtagatgtcagagcaaaagggtattatggaaagtattactatagtaaatattatggtggggattatagtagtgcttattatcaaaaaccagaagaatttacatcggagacgtaggatatttaagagcttttaacgatgaattagttagtaggggaaaaggaatgaaaaatcttttaattgttggtgcgggagggcacgggaaagttgtaaaagaaattgcagatgcattagaaaaatttgagaaaatagagtttcttgatgatgtaaatccaaaggcaattggaaaaatagaggaaatggggcaatttagaaatgaatttgattgtatatttccagcagtgggaaataatgaatttcgtagaaaaataatggagaatgcgaaaaaaatgaattatgaagtgccggtattagtacatcctacagcttatgtaagcccaagtgcaaaattgggaaatggaactattgtagaggctatggctgtgatacacacaaaagcagtagttgaggaaggatgtattattgcgattggtgctttgattgatcatgaggctttgattgaaaaatatacgtacataagttgtggaacaattgtaaaggcaaatgcaaaggtggggcagttattaactattccaagtgggattattgttacgaaagaggaaatgtaaaatgaataaacaaagcgtattaacaaaaaggcaacaatattatttgaaaataaaaaagattattgatactatctgtgccttactaggtggcatagttttacttccaatatttcttattttgtgtttagccattaagattgattcccaaggccccattttgtttaagcaaaaacgagtaggaattggtaaaaagcatttttatatattgaaatttcgaacaatgaaaatagacactccaaaagatatgcctacacatatgcttgcaaatccagaacaatatattacaagggtaggaaagtttttaagaaagacaagcttagatgaattaccacagattttcaatattattcgaggagatatggcaattgttggaccaagaccggcgctttggaatcaatatgatttgattgaagaacgagataaatatggagcaaatgatattctcccgggattgactggatgggctcaaattaatggaagagatgaacttgaaatttctgctaaagcaaaattggacggattttatgtaaaacatgtgggactacgcatggatacaatctgctttttacgcactattttttctgttttaaaatcagagggagtggtagaaggaggaaccggacagatgaatagaaatacaagcgaaactccagaaaaaatgaaaaaaaaaagaattctagtagtatgtcaatattataaaccggaaccatttcgtatttctgatatttgtgaggaaatggctagaagaggacatgaagtacaagttgtgactggatatccgaattatccagagggaattctatatgaggggtatggaaaaggaaagaagattgacgaaattatcaatggtgtgaaagtgcatcgctgctatacggttccacgagaaacagggactgtaaaaagaatgttgaactactatagttatgcagtatcttctgtgaaatatgttctttccaaagaatgtaatgcaacggatgggaaaccgtttgatgttgtattttgtaatcagttgtcaccagtcatgatggcctatgcggcaatagcatataaaaagaaatataaagtccctacagtgatgtattgcttggatttatggccagaaagtctgatcgcaggtggtatcacacgagaatctacgctttacaaatattaccaccatgtaagtaaaaaaatctatgagaagatggataaaatattgattacttctcgtatgttttctgattacttacagaatgaatttgaaattgaaaatgagagaatagaataccttccacaatatgcagagggaatttttgaaaaagcagagccaaaagatacgaaagaaacttttgattttatgtttgcaggaaatataggagcagtacaaagcgtagagactattattgaagcagcttctttgttgagagatgaacctgtaagatttcatatcgttggaggtggtagcgatttggaacggcttcagaaactgggagagcgtgaagaaaatgtgattttctatggcagaaggccattggaagaaatgccgagtttttatgagaaagcagacgcgatgcttattacattgcaggcagatcccgttctcagtatgactcttcctggaaaggtgcagtcttatatggcagttggaaagccaataattggtgcgattgatggtgagacgaagaaggtcgttgaagatgcgaaatgtggatattgtggtaatgcggaagatgcagaagcactagcagagaatattagacaattcatcaaaaattcagataagaatttgatgggtgaaaatgcaagagcgtattatgagcagcattttgaacaagagaattttatggacaaattggagaaagtaattattagagaaaggttaagaaatagagatgtataatgttgcggttacaggggcatctggtaaatcaggacaatattttcttaaaaggctattaagtgagaaggatcatgtaaaagattttaagttttttttgatctgtagaaaacaaggaaaaggttctaaaaatacagagggatatcaaataattcaacgtgttttagaaaaaaaagaacttcaagttgaattggtggaaattgatttgcaggataaagcagaattgaaattgttttttgaagaacatcatatcgatatgcttttgcatattgccagtgtaaaattatcatcatatattgtcccagcagccttaaaaggtggagttaatagtttcattttggtgcatacaacaggtatctattctaaatataaagcagcaggagaagaatatagacagatagagtttagaattcacaaactagtagaagaatatagaagaaagggtcgaaatgtaaccatgacaattttaagaccgacaatgatttatggtgatctacaagataaaaatgtatctgttttcatcaaaatggtagataaacttcgaatttttcctacagtcaatggagcaagatatgatttgcaaccagtatggtgtaaagacttgggaaatgcgtattatgatgttatgttaaattggaaaacaacacagaacaaggattatatcttgtcaggaaaagagccgattcagttaagagcaatgtttgaaattatggcaaaacaacttggagtaaaaaatgtatttattagttgtccatttccaattgcctatgctggagcttgcgtgatttatttcttgacatttaagaagatagattacagagaaaaagtacaacgattggtagagccaagagcatattcacatgaaaaggcgacgaaagactttggatatgatccagtatcgtttaaggttggagttagggaagagattcagatgtataaagaaagaaaagattaatgaaaaatttgcttttattttttattatgttgttggtgatatggtctttgttattcattatatgctcatcggccaaacaagaaaaaatggaatttctagattttaatcatacgaatatcataaaaggatatgcgattttggcagtactttttggccatgttggacagtattcaggagtgaatggaatagagtatcctgcaggagttggtgtttctttgttcttgattttgtcgggatatggtattgtgctttccgttaagaaaaatggattgaatagattctggataaagcgtttttccagagtgtttgtgccatatattttagcagaggggatattcttcgttgtacaaggaaaagatttaagctttacagatatcattatggactttagtttgttaaaacctttgcactcgtttgggtggtatctacattatattttgatttgttatatactattctatgctgtgtggaaaattggtagaactgataaagaaagaatgatattacttattacattatttactgcttggttttttataaaatccattgtatttatagatgaaccattcttccttgtagcacggcagatgttggcattccctataggtgtctatataggattaaggaaggacaattactcggaatggagtataaaaaatagtatttctgtaagtttgattgttagctcaacgattacgtatgcattccttcatttgcctaatgtaaataatttaccaatagttttctataatttttttgcattgggaacgtgtacaacatgtgcacttggaatattaggcttgacatattcattaaagttcttacaaaacaaaggtatggctataatagcgagtttttcatttgaaatttatattgtacatggatacgttatagatattttaaataatgctgagaatgcattggggggcatagctggattcctcctttacacagttgtaggaagtgtgttattaaaagttttggcagattttatatatagaaaaactgagacgaattagttgatgatattatagttattcttcacggaagattttaaattaggtataaattctggatattctttattggcatgattatgtttgtaaaaaataaatttaaactagtagtaactattaggaaagggaaaattatggcagacttaactgtgctaattctagcacataatgaagaaaaaaatatagaaaggtgtatcaaggaagttaaaagtattgccaaacgtattatagtggtagatagtgggagtacagatagaacagttgagatagcaggtaggatgggagcagaagttttatatcatccatggaaaaactatgctacacaatataattggggaatacaaaatgcaagtattcggacaaagtggatttttagattagatgcagatgaatttttaacaaatgaagctagagaagaaattgaaactctctgtaaagaaaatgaaaatacagatgtaaatggattagtagtaagatttacagttagtttccttggtagagaattgaaacatggtggtatttatccttttagaaagctattaatttataaaaccaataagggatttatggaagaacgaaatatggatgagcatattgtgttaaaggaaggacggagtattgaattacaacatgattgtattcatcaagatttcaaggatttaacagcatggattgataagcataacaaatattctagtagagaagtattagactattttgaaagtattcaaaaagaatcgtcaagtgattacaataagttggataaaaaagcaagatttaaacgatatgttaaatttggtatttattataaactaccattggggatgagagcttttttgtattattgttatcgttattattttaaatttggtttcttagatggtaaagaaggaaaaatctttgcgtttctacaggcctactggtatcgttttttagtagatgcaaaaatatatgaagcacaaataagtgagaaaaaggaataaggaaatgaagaagattttaatattaacgggacactatcttccgggatacaaagatggtgggccattgagaacgttgattaatttgacagaggcattaggaaacgaatatgaattctatattgcatgttatgatagggatcaaggagatacagaatcttattcaaacattcttttgaatacatggaatctgcttggtaaagctaaggtttggtatgtagctcctgggggctttactcaaaaactgataattaaatttgcatctcaggttgatttgatttatctttgcagtttttatgaggagtatggatataaaactttgtggttgaaaaaaaatagaaaaatcacttgtcctgtgattgtggcatctatgggagttttttcaaaaggagccttatcgcataaaacattaaagaaaaaagtgtttattaatgcatgcaagttgatgggaatatttaaaggtattacatggtcagttacatctagattggaagcagaagatgtgaagcgagaaattggcaataatattaaatatgtcattgcagaagatcttccaagaacaaatattcctgggtatcaggtgcgaaaaaaagagtttagtgtagcctttttatcaagaatatgtccacaaaaaaatcttctatttgctatagaaattttaaaatatgtaaaagaaaatcttcatttctttatttatgggcctgatcaagataaggaatattgggagaaatgtaaaaaagaactggatagattgccagataatattatgtgggagtattgtggagacgttccgagcgaagatgttcaatcaaaacttgcgcagcatgatgtgtttttgcttccgacaaaaggagaaaattatgggcatgtgatttttgaagcactttctgttggatgcataccgataattagcgaccaaacaccttggaatgaaatacaggaaagacatgctggatttatttattcattgaatcaaaaagatgatttttccaaaacaattgatatgttagcacaaatgaaattagttgatagagaaaaaatagcagagaatgctgtgaaaattgcaaaatgcaaagtggagaaaaattgtagagaaacaggatatcgaaagatatttgggtaggaggagtgttatgaaagtattatggttaacgaatattccttcgccgtatcgggtaaagtttttcaatgagttgggcaaattctgtgatttgacagtattatttgaaaaaaaggcatctgatgaacgcgatgaaagctggaaaaatttttatgcagaacattttcacgccgtttacttgaggggaaaaagcattggcgttgctgaagcattttgtccggaaattgtaagatatttgagagataaatatgatcatattattgtgactaatttttctgatccgactggaattcttgcaatcgtgtggttaaaatcaaaaaaaatcccatacattattgagagtgatgggggatttgccggttctggaaaggggattaaggaaaaaattaaaaagtggttgatttccggtgctgatttgtgttttagtactgcagaagagcatgacaagtattatttgacttatggtgcaaaaaaggagaaaattgttcgatatccttttacatctattcaggagatagatattctgacatcacccatattggataaagaaaaaagggcattgcgtaaaaaacttggaatggaagaaaagaaaattattctttcagttggacaatttatatacagaaaaggatacgatattctctttgatgcgcttcgtcaaatggatagatctattggttgttatattattggagggacgccgacagatgaatatctagaaatagtgcaggaatatcaattatcaaatgttcattttttggactttatattaaaagatgagttgaatgaatattatagagcagcagatttatttgtacttccaacaagagaagacatttggggacttgtgataaatgaagcaatggcacagggactacctgttgttacaacttttcgatgtgtagcgggtttggaattaattcgggaaccgatatttgggaagcttgttccaatagaggattctgaggcattagcgaatgcggtggagagtgaattagaaaaattatctgaaaagagaggccgtaaaattttggagaaaataaaagaatatacgattgagcagatggctcgtgtacatgtggagtgtttagagaggatagaagaaagtgacaaataggagtgaagctatagattacataaaagggattgcaattataagtgtgatttctgctcattgcaatgcggttttagatacacgaaatagatttgcactaatatcctccttgattttgcaaaatataggaaccttgggtgtgatttgtttttttgtaatatcaggtatactatttcattatcggggaaatggtgttggatcttttttcgctaagaaagcaagaaatattattattccatggtgtattagcgcaacttgtgtatatttgtatgtttatttaagaaagccgccgattacaatgagaggttacttaaattttattttgggtaatggaagttactgttattatcttacagtattaatagttctatatgttttgtttgtttttttcccgtttatgcgtaagaactttatattaatagtttgtatgggaataacggtattttctacattttgtttatatgatattggtggcgtaaatccatatttgaatatatttaattggattggatatttcgctattggagtatatatatctgaaaatcagaaggcttggatttggttgaaacaaaaaataacttctcacatattcttttggttgattttaggtggtggaatttatgttgcaattttaatatatcaaatatatcaccaaagttgtggggggtattggaatggactaaatgtcatttcttgctggagcggttcaattgtagttgtattgacttctaatgtaatagaaaaaagaaaagatagtttattcaagaggacaattttacaagcaggtcgtgactcttttggaatctatatttggcatatgccagttgcgggaattattgctcgtattatgagcattagggcaatggcttggttggttatcataagacctattattgtattgttaattatgttagtaataattagagtgacgaaaaaaataatgtttaagatgaagcatgaaaaatatttaaggtatttaggaatttgaatttaggagagtattttgaagaaattagtttatttagggtatgttgtgagtccagaagaagcaaatagggtaactggagcatctgtggctggtaataaaatgcagtggaatgttgtaaaaaatttatcaaaatacgatgatattgaattgatttgtgtggttatttcacctttagcagcgtttccaaaagaaaaaaaaatcattcaaaagcaacaagaggaagagattataaaaggagtaaaatctattcgaattggattttgcaatcttccaattattaaacaattttggcaaatctttagtgtttacgttgtggcaaaaaaagtgataaaagagatggatgctgatatcttgtttacttttaatttgtttccacaggttggtatacctatgagatggctcaaaaagaaatttgagcatctggaaacagtatgtcttttagctgatttaccaatagatgataataccaatcgtaaggctttttccacattccttcgtaagatattcgaaagatccacatggaaaagtatgcagatttgcgaaaaatatatagttctgaataagcatgttattgaaaaatatctgccaggaaaatcatacattgttgtagatggcggagtggatgaagatgatattaaacgctatgaaaataatgctcggaaaagtaaggaacataatgtgctgttttgtggtgctttgactgaatataatggcattttaaatttaatagatgcaatgaattatttacaggatacggatattattttagatatttatggtggtggatatttggaaaactgtgtaatagaagcctcaaaaaagaataagaagattcgatatcacggaaaaatttcaaatcaagaggtcatgcagaaacaaagggaagcatggttgttagttaatccgagaattgtggatgatccaattacacaagttacttttccatcaaaaacatttgagtatttgttgagtggaactcctgtattatctacaagattaaatgggtatgggaaagaatatgaagacaatatgtactggatagaagatttatctgcacccgctttggcaaatacaataagtgatattcgtaacatagaggtgagtgaatatcaaaatatgggagaacgtgcaaaaaatatgattatgagcaagaagttgtgggcaaagcaatgtaataaaatctataaatttttgaagggagaagaataattgggcatgaagtgtgtatttagtgttgatgatttagtcttttggtttgttataacagatattttgcttttgccctattttaatctaatagtcattccactttctttttttgtaatcattttatgggtgattcagaatagaggaattgtaaaacgtagccaagattacaaaggcttacttctttgtgtaatattaatggttgtcagtacgcttatgggaactgttgttaattctgcttatggagtcacttttgataacataaaaagattactgcagtatggtatatcgtttgagtacttgtatttttttagacattattttagtagacagcgcccaaatcttaaaagaatcctgtatatttttattttatttgttgttggattggcagtgatatttcagattaaccctacaatttattctacaatatgctctatttttaataaaggtaatgcgtatatatcttcctcatttttagatagtgtttattacggctatacacttagatatggttttatatggactgatcaaaacaacatagcatatgcattgacgggtattattatgtttattttgatattttttaagcatgattttgtggagacaattgttctttttgttgctaatgtgtttgttttattttgttgtatgagctctggcggatggattggatttgcaatctcctggctattatatttattatatagaattacaaaaatgaaaaatacttcattggtgatttcaagaaaaatgttaataagttttgtgttgatagctttcataatatttttggtagtagatagtgggatattgtctcagtttatggaatcagatttagtaaatgctgccactgaacgtttcgaaaataatgaaaattcaagaacagaaatttggttacgtattttagaaggagagaacatttttaagcatacgctaatgggtaatggttctgcattgataattaatggtgtaagcaaagctgcccatagcggacatttatattggatttatgcttacggaatgctgtcatatttcatttttatgaaaaaatttttttggtttggtacaaaaaaagtatggaaatatattcctattatcagtttttttctatgttttaccatgaatacaatggttggagaacaaaaacttttattaatatatattatgattgttgcatatttgagggaggtagataataatgagtgctcaagtcagtcttgttattccagtatataatgttgctgattatttacaacagtgtttggaaagtgtagaagaacaggattatgaacagctacaggttgttataattaacgacggttctaaagattgtagtctggaaatttgtgaggaatatgtacaaaagcacccagagacatggatgttaatcaatcaagaaaatgcaggtttaagtgcagcacgtaatacaggattactttatgctacaggtgaatatatagcctttttggattctgatgactggattgatccaaattttatttctacgttggtaaaggttatggaggatacaggtgcagaaattgttgaatcaggtatacgatggtgttatcctgataaaatacatttggacgcaattacggaaaatagtatatatggtatgagagaagcattaggtcattatctattgcagacaaaaccaattcattcggcagtatggtgtaagttatatcatagagatattttcacaaatttaaattttaaaccaggaaaacttcatgaggatggatattttacttatcaggcaatgtataaatgtaaaaaatatgctgttataaattacattggatataactataggcagaatcgggagggaagtattatgtcttctgttgttaagcctaaaaatattattgatgttatggaaatgatggaggaacgaattctattttttaaagaacataatgaaaatattcttgctgaaaaagcggcatcttattattatcgaacagcgctaacaaattatgtgacagcaaaaaaagttattcgagatgagttattaagtaaatcaataaaagataaactgattaatagcaaacgtttgattctaaagaatcattatcttggggcaaaaaaattaaaatttttgttttttttctgtttccctaattcgtttttgaagaggtattaagttatggatgcaaaatattgtaagaaagcaatgaaatatcagataattagaagtaaggtaaaaaaaaataatttgtttcttagagagaatgtttgctctgaagcccctccaattatatatcttttttttgtggcttgtggtacaaatatgggggatcatgcgattgttcgagcagaaaaagaatttgtgtataggtgcttaggagccaatgtgacaattgtagaaatccaaacaagacagacagaatcggcaattgattatttaaaaaagaatatgagaaaacaagatgtaattgtttttagtggtggaggatatattggagatgaatacatcgaagtgtatatgcctctcaagaaaattcttaaaacattcaaaaagaataagacagttatctttccgcagacgatttatttctctggatatcaacgagaaaaaaagttctcaaaattgtgtaaaaatcatgagaatttaatgatatttgtaagagagcaaaaaagtcttgaaatttttcaaaaaagtggaattactgcacacttagtacccgatattgtacttagtcagatgccccaaaaacataatgcatatgagaaaattcttctttgtatgcgtaatgatgttgaaaaaaatatatctgattctcaagttaataaactacatacagtattgcaaaagtatggttctgttattataactgatactgtagaatcaacaatttttccttttgatcagcgatttgtttatttagataagatgttaaatttattctcgaatagcaggcttgttgttacagatcgaattcatggtatgattttttcgtatttaactaatacaccttgtttagtgtttggaaattataatcataaagtagaatcagaatatgaatggattaagaattgtcccaatatttattttatgaagtcttttgatattgacaaaataaatgaaaaggtttctgaaatgatagattgttttaacggcgataataaaggactccatgagaaatttgtaagattggaggaagaattaaagagatattatgagcaataaacagtacaaaaatttagttacaaattcacttgtatttacaattgcaaatttaggaagtaaggttatttcgtttattatggttccgttatatacatatgtactcactaaagaggaatacggaacggtagatttgatgacaacatttaacagtttattgattcctgttttatttttatgcgcatcagatgcagtgctacgatattgcatggataagaggtacaattcgaaagaagtgctatctaattctttctttatttatatttggggaataggattactttgtctaattgttccagcattgggaaagttttatccagatatagcaccatatggagtatgcttaggaatgctactttttagtaatggtttaatgcaagtttctaatcagtatttacgggctacagggcatataaaggcatttgctgcgaatggaattatatatacatttgtatttgcatcattaaacattttatttttggtaaaactccgattaggtataaatggatatctatatagcatgattgcatcaaatatgatatgtgttttggttgcaacattatgctcgagaatgtggaagtcaattacacttaaattgtatcctaaaacactaaaagttatgctcaagtattctattccattaattccaaacgctttaatgtggtggattatggatgcctcagataaattgattattacattttatttaggtgttggtgcgacaggagtgtttgctattgcaaaaaaattaccgactctaatcgatacatttcattctatttttaaccaagcgtggcaaatttctgctattcaagaaaatgatagttctaatgtgagagaattcacttcgaatgtttataaagtatattttacatgtatgattcttgttgtagggggattattaacggttgcaagaccattttcccaatacttattgagtgatgcatatggaaatacttggctatatataccatttcttttattggctgtggggtgttcgtgtctatcaggttttttgagtgcaaatttaattgcggcggaacagactacacaaatattcaaaacaactgttattggagcatttgttaatacggttttgaattttatactgataccaacgttaggattgaatggtggagcaatcgctacctttttgggtttcatggttgttttaataattcgtgagaatttattgattaggcaagaaaagttgatgattacatttaatcgtatattactgattactataattggagttcaaatagctgtatactatatgctcccatttctatatgctttgattatattgtttactcttgaagtgcttatgcttattttggtacggaagacaatttggcaatttattaagccaatagtaaataaagtgtgtaagaaggagcagtgatatggatagaaaaaaaataaagagaatgttgcaagataatccacgaatggcacatatattatgtacaatttataatcgctttccatttaataataaatttagtttaagtaaaaagaacaaattgcaaaataatggtatattaaagaaatgtgcagtaaaagtaaatggaacaggtaattctatttatattgattcattagcgagacttaaaaatgtaagcattactattaaaggaaataataatcaagtttatattggaaaagggtgcttgattatagaaggagaactttatatagaagatgatgggggagctattgaaattggtgatgggactgaaatttgcggaaaaactcacttggcagtaatagagggggaaaaaataactattggggagaagtgtttgttttcatcatcaattgtaataagaacaggtgatagtcattctattcttgatatgttagggaatagaaccaattattcacagtctgtacaaatcggagatcacgtttggattggtaatcaagtaactatccttaaaggttctgaaataggtagtgattgtattgtgggaacaggatctttggttacacaaaaaaatgatgatacaaatgtaattattgctgggaatccagctaagataattaaaagaaatatttcttggtgtggtgaaagaataaagcggaaataggaagttgggagagaatgaaatataatgatatcaaaagagaattttcaattgataatcttcgggcaatagctatagtgctgtaagtactcaaatacatgtaccattacaaacgaaaaccctgcatttctgcggggtgagggtttgttttgataaatataaatgaaccttgaaaatttaagattttttaaacttgctagggtatttctcctgaaccactccaatgctaaaggaaacaattcagagaaacatcaatttgtaggttattttaaagatatgtgggaaaataatattatatcaaagggtataaaagtagaaaaaagcctgggggatttcgcaaattttatgagttattgagtgagcaaaaagaagagttaaagaagaacgaaaaaaacttttgcggttctacataccaaaaattttattgaatgcgtagaggacatgattaaaaagctggaagaaaatatataatagatggtcagaccctataataaaaaatatgaggtttatggaagatatgcaaatactaaagcattaaattattacgggatagatttgaaagagatatagggaaaaatcaatatattgtcagaatcaaggaaagatttaattggaatatacatgagccaatagaagagagaaaagcgattctcaacaaatagagtgaaaaaacataaaaatatttgtaaatttcattaatcggggtatgggaagggaatgcatagaaatgaatttagaaaaaacaatcaaaaatccgtttgtggtaaatcacaaaatatacttattatgattataatatcatgtaatggcttattattttgttcttaccgcatatttgatttgaaaaatatgatatatgagattgttcaaaatatatcattagggtgtttagcgtcagtcatagtagcttgggtgttagaattcaaaaatgtcagagataaaaataaattgcatgataagctatatagttcagcatattatgaactgtattttgtaatagtaaattacttagagatatgggcaaatctttgtacggctacatttaaagaagaaacaaataaaaaagagaggcgtatatggtatttgtggtataaaaaactaagtatttattttatagtaaaaaagaatatcgaaacaataagagattgatacagtattttctaaatgaaattcaatattcatctgaatatataatgtctactgttgaaaagctgttatttcagaaaaatgtattgagagcgaataacatatatggcaaagaaataggatttattttagaagatttgcgatttgaatttgatggcgtggataagttggaaaacgatatagatgcagatgaattttggaaaattatggaatgtattaataaggatctatatcgtattataaaagaatggaaagatattagatattataattatgtgtattttccttcgcatggttttcatgaggtgtgtgattattgggttcaagagtcaaaagaaaggggagctcgaaatagatgaagaaatatcaagtatttgtcagaaaaatgatccgtttatgtgagttacaattggaaacgactttaacaaaagagaaaattttcaattataaaaaagcattagcaagaataagcattcgcgattattagaatagtaaatatgaaaatggtgctaaaaaacaaatttatatcatatataggaaaggaaagaaaagatgagtttatttaaaggaaaaacattattaattacaggaggaacaggttcatttggtaatgcggttttgaaccggtttttaaaaacggatatcggtgaaattcgtattttctctcgtgatgagaaaaagcaggatgatatgcgtcatgatttccaggtgaagatgccggaagtagcagataagattaagttttatattggagatgtcagagatttacagtcttgtagaaatgcaatgcctggtgtagattacatatttcatgcagcagcattaaaacaagttccatcctgtgaattcttcccgatggaagcggtaaagacaaatgtagaaggaacagacaatgtattaacggcagcgattgaagcaggagttgaggctgtcatctgcctttctacagataaagcagcgtatccaattaatgctatgggaattacaaaagcaattgaggaaaaggtagcagttgcaaaatcccgtatgtcagggaagacaaagatctgttgtacacgctatggtaatgtgatgtgttctcggggatcagttattccactttggattgatcagatcaaggcaggtaacccaatcacagtaacagaaccatctatgacacgttttattatgtcattggatgaagcggtagaccttgtacttttcgcatttgaacacggagaaaatggagatcttcttattatgaaagcaccggcttgtacaatccagacacaggcagaggctgtatgtgaattatttggtggaaagaaagaagagattaaagttatcggaatccgtcatggagaaaagatgtatgaaacacttcttacaaatgaagaatgtgcaaaagcaatcgatatgggggatttctatcgtgttcctgcagataatcgtggattaaattatgacaagttcttcgttgacggagattcagagagaaatacgcttacagaattcaatagtaacaatacaaagcttttgaatttggaagagacgaaggaaacgattgcgaagcttaagtatattcaggagagattggcagaagagtagataagaaagtctggaggattacattatgaaccacaattttacttggaaaaacaatggacgaacaaaagtaatgattggatgcggaactcgtccagagattattcgtttagctgcagtcatcaagagatgtcgagaatattttgacacttgtgttgtgtattataaccaaaactgggacaagaatctctcgactgtattttgggaagattttgaattgaagaataatgaaggtgagtttggaccggatattcttgttccggttgtaggagagaatcttggtgtcacatgcggtaacattcttggaagaagctatgaattgttaagcgaacttcaaccggatggatatttagtgttaggagatacgaatagctgtctttctgctatttctgcaaagcgtttacatattcctttattccatatggaagcagggaaccgttgcaaagacgaatgtttaccggaagaaacaaaccgtcgtatcgtagatgtcatttccgatgtgaatctttgctactctgagtttgcaagaaaatatttggctgatacaggacttccaaaagagagaacctatatgaccggatctccaatggcggaagtattacgtggaaacttagaaaagattcaggcgtctgatgtgttagaacgcatgggattagagaaagataaatatattcttctttccgcccatcgtgaagagaatattgatacagagaagaactttacaagtctttttacggcaattaatgcattggcagagaagtataatatgccaatcttatattcttgtcatccaagaagtaagcaaagattagaaaaaagcggattccaactcgatccgagagtcagagtcaatgagccgcttggatttaatgactacaactgcctacagatgaatgccttagcgattgtaagcgatagcggaacacttccggaagaaagcagtttttatttatccatcggacatccaattgcagcagtatgtattcgtacttctacagaacgtccggaagcattagaggcaggagattttattcttgccggaattacaacaaaagaacttctcaatgccacagacatggcgattgagatgaaacagaaaggtgttcttggaaaaccatgtccggattacgtagatgagacagtatctatgaaagtagtacggatcattcaaggatatgtgaatgttgtaaataagatggtgtggagaaaagaacaagaataaagagcattttagaatatgatgtgaacaaagatgacgggcaggtactgaggcttaagaaaactgtaccgagcccgtttttttactcggaggaatgaaaatgaatatcttagtaacaggagcaaagggaatggtcggaacagctctttgcaataatttgaaaaatatccgtgatggaaagaataaaacaagaccgaaccttcagattgacgagatttatgagtatgacctcaatagtacagaagcagaattagaggaatattgttctaaagctgattttgtattcaaccttgctggtgtgaatcgtccagaaaatccagaagattttatgaatggaaattttggatttgcctcacaactgttggattgcttgaaaaagcatgagaataaagctggaatcatgttatcttcttctgtacaagcaacattagccggaagatttggcaactcagaatatggcagaagtaaaaaagcaggagaagaattatttttccaatacagtaaagaaacaggagcccctgtatatgtctatcgatttgtcaatctaatgggacattcaagaccgaaatacaatagcgctatttctacattctgttgggcggttgcaaacgatgaagaattcactgtgaacgatagaagtactgagctagaagttctctacatcgatgaccttgtagaagggatgtttgatctgttggaaggaaaagaacagcgttgtgaatttgatggtgtagaaaccgttctgaaagaagatggaagatattgttgcgttccggttacacataaagtcactttaggggaaattgtggatttattggaacaatttaagaatcaaccaatgaacctgatgatgccgaaatgtccagaaggttcttttgccaagaaactttttagcttatatttaacatatcttccaacagaaaagtttaaatatgccatgaagatgaactgtgacgacagaggaagctttacagagctcatgcacacgatggattgtggacaagtatcgattaatatcagcaagccggggataacaaagggacagcattggcataacagtaagtgggaacaatttatcgtagttcatggacacggactgatccaggaacgtaatatcaatacaggagaaattgtggagtttgaagtcagtggagagaagattgagagtatctatatgataccggggtggacacataatattattaatctgtcggatacagaagatctcgtaacggtgatgagttgtaatgaggtgtttaatccggaaagaccggatacattctttgagaaagtgtagagaaaaagaaaaattgagaaaactatcagtggtagaatttaattgctattataacaaataatagggaggaaaatgtatatgcatcactgattttggagagagtgcctttctatgatgaggaagtaggaaggaaattagcagcgtttgcggtgaggctggcgcagagtgttccaatgtattatttgcattgtaatattagtcaggaagcagtggagattgtaagaaaagaaatattttgcgataattagtagaaaaatagaagtggaaatggagaaaataggatgaagattaaagatacttttcagcttgtaacagtagcaggggaacatatggtcattccgattggagagcaaagtgtggattttcaggcaatgatcacactaaatgagacaggcgcctttttatgggaaaaattgcaggaagaaatgtcagaagaacaattggtttatgcgttgacagacgtatatgaagttggaaaagaaatagcagaagaggacgttagaaagtttctttctattttaagaaggaaaaatattttggaatcatgatggaagaaagaacagtaatactttctttggaagaactttctccgatattgaatagcctgttagaacaaggacagaccatcactttgcaggtgacagggacaagtatgatgccgttgtggatgcatagaagggatcaggttgttttagaacattgccaggaaggaagtttaaagaacggagacattgttttatatcggcgagaaaatggtcagtatgtcttacatcggattataaaactttatgatcgacagatgagtttatgtggagatgcacaatcaaagcttgagaaaaatgtttcaacaaatgcagtgattgcaagagttgtgaaaatctgcaggaaggggaaatggttttcctgtgatcataggggatatttattgtatgtgtatctgtggggaataatgcgacctgttcgagggaaggtgcttggaattgcaggcagaatcagaagtcttaaaaaaagcaggaaatgaggatgaatatgaatacggtgcagacagctgtcatacagttattgcaaatttacatgggaatggatgattgcgtagacacattcccaaagcaggtagattgggcggaagtatatgaattggcagtcaaacataatataggcggaatcttatatacagcgattagaaaacttcctgaacagcaggaatcacaaaaggatattcagagagagtttcaagtgcacttttatgcatctgttagccgaagtaaggagcaggatatgcggatggttcaagtaatagaatacctgaaccaaaagaaaatttctcatgttttaatgaaagggtgggttttaaaacgatattatcccattccggaattgaggacgatgggggatgttgattttctgattcgggaagaggatagacagcgtacacatgaagcacttttacagcttggatttctctgcacatctgacaagggttttgtgtggtgttatgaaaaaggaaatactattttagaagtgcatagtcgaattgtttctcaaaaagtaggaagaggggtagatacggagcagtactatttagatgctatttctcatacagaaaaggttcggggagaatacacactgtgttttattaaagagtatcatcttgtatatttatttgtacatgcagcgaagcattttcaatatgcaggatatggattgcgtggacagttggattttgcattgtttatagagaaatatggaaatgaattggactgggattacatttggcaggaactagagaagttgggactatctgcgtttgcaagagcaactttgactttgtgcaaagagtggtttggtacgaaaataggctttcttccagtgcaaatggaggcagagaactatgaaaagatgaaggagattatttttgcgggaggggtgtatggctattgtggcagaaacatggaggcatcccaagtgcgtaatcagttggagggagcagagaagtcagatttaaaaacactgaaatggaaagcaatgataaagatgatttttccagatcgacagtatatgagaatgtacttaaagaatgtcgagaaacacccgtcacttttgccggcagcgtgggtaatccgctggtaccaggctatatttaaaagaggaagcagaaatacacagagaatgaagcagtttctgtcagtggatgaaggggttcgagaagaatacacacttttgaaagaacttgatctacttcaatagtgaatgcgcagaagatgaggggaaggaaacatatgggtagattttttcgggatataaagaaatattataaatatgccatttactctggcagagcgggattgaaggcagaggtggcaaattcacgcttgagttggctctggtggattttagatcctctgttatttatgatcatatattggttcctgtcgcagattgtttttgggcaaagaacaagatattatatggtctttgtatttatcggattaaatatgtgggatttttttcagaagagtattgtgaccaatgtaagagttgtgacgaataacagttcgattgtaacgaaagtctatctgccgaaattcattctcgttttgattgagatgtttaaatacggatttcgaatggcgattgcatttggattggtaggtgtgatgatgatactgtatcgtgtcagaatcacttggaagattttatttgtgcctcccattttctttacactatttctgcttgtatttggaatctcctgtatagtagcacattttggtgtatttatcgaggacttgcaaaatgtggcggcagtagggatgcggcttttgttttatatatcaggagtattttatgaaattgagccaaagctgaaaggaatcagccggattccgggaacgcttgcggacattatgatacagtggaatccgatttcttttttgattacgcaatgtcgtgaagcactgatttatgcaggaaatataaatctgacgatgctgtgtttttggatggctgtcggatttttattatctgcaatcggtgtttttttaatctataaatatgagaaagattatgtgaaggtgatttgatggacgatagaaaaaatgcaattgaggtggaggacgttcatctttcttatcagtgtctccaggcttttcctctgcggaagagtatttttagtttgaaaaagagtaaggtagaaaaatatgaggcgctccgaggtatttcttttggagttaaaaaaggagagattgtaggggtgattggaagaaatgggagtggaaaatctactttgctaaaagcaattgcaggaatttttgcaccagatcagggaacaatcacacttgcaaccccatctgtttcgcttttatctattggagtaggatttcaacgtaaactgacagggcgtgaaaatgtgatgctttctggaatgttgctgggctttagtgagcagcagattttagaaaagatggatgaaatcatagaatttgcagaaattggttctttcatcgaccgcccggtgaagacgtactcaagcggaatgttttccaaactggcattttccattactgcagttctggagacagatattatgctgatcgatgaaatcctgagtgtaggagataccaaatttaagaaaaaaagttatgagaagatgaaagagctgatttttgataagaatcgaacggtaatgatcgtctctcataatccagatactgttagacaactttgtacaagtgtattgtggatccacgaaggaaaggttaggatgcagggagatgtggagacggtgttagaggcatatgagggggaaacataaggattttcaattgcggaacagcacagaatctgctatgataatctcatagaattcctctgtcaaatggaggagtatcatgagaagaaaacatcgtttaaaggaacttacgatcaaagataatttcatgtttggtgcagtgatgatggatgaaaataactgcaagggacttttagaaagagtgctggagataccgatcgatcgggtggaagtcagccgagagaagagtatcgtatatcatccggaatacaaaggtgtccgattggatgtttatgcgaaagatgagtgccaaagtcattataatgtagagatgcaggtgaaaagaaaggtagcactcgggaagcgaagccgttactatcagagtcagatggatatggaactattactatcaggagaagattattcagaacttccagatacctatgtcattttcatctgtgatttcgatccatttgaagaagaaaaataccggtatacctttaagatgaattgcaaagagtccgggcagacgaatctggaagatggaaggactatcgtatttttgaacacacatggaaagaatgaaagtgaagttccaaaagaactggtaacatttctaaagtatgtaaaggcagaccttgcaggaagtgaggaaacgtttgatgatccctatgtggaacagctgcagaattttatccgtaagattaagggaagcagggaaatggaggagcgctttatgatttttgaagagatgctgaaagaagagcgtgcagaaggatttgcaaaaggacgtgaagaaggacttcaagaaggacgaagtactttgaaagaaaccctgctcttgtttttgcaaagtttcggagacattccagatgaggtcttggagcagattcaggcccagcaggatatggaagtgttgaagaattggatgcagaccgccttccggtcaaagacgttggaagagtttgtacagaagatgtaagaaaaatctatttctgattgatgatcagatctaaatcttcgggggtttcactgttcttgtgaaatctccgagataggaaacaagtcgatgccgtttcaggcaagtattcaagaatagacagaggaattctagataatagatgaagtggaagagaaagttttggggaaattgtacaattactttatatggaaacttccacattttttgtagcagccttccggtagatgtggtatgataagtttatatcttacataggaaggaggggtatgtttccaatttggattcatacaaaagaagaagtgaaacgtttattgattttaggtgccggcggttttggccatatgattcaggaaacagcaagattgttaggatacgaagaggttgtatttttggatgatgctgtaaagggagcagatgtgattggaaagtgctgcgactataaggcatttttaaatgagtacgatacggcagtggcagctctgggagacagcggaatgcggctatactggacagagaaattgatggaagcgggctacaaagttccggcgatcattcatccgtcagcggtcgttagtcctagtgcggtgatcggcaatggaagttttattatgcagagtgcgattgtcaataccaatacagttgtggaacatggtgtgcttgtcaacagtggggcagttgtagatcatgattctcatgttggatgtggagcacatatcggactgggcagtgtcgtaaaggcgaactgtgtaatcccttccagaaagaagattgaagagggagaagtgatcttctctacgagaagaaagattgacggtgtgacaagcagaaatctggaagatgcactgtatgcgtttgggttcggtcttcagtgcagctatgtgaagccgtttggagagggacatattaacgagacgtatgcggtctatatgccgacggaggagggcgatgagtttgcctatattcttcagcgggtgaataataatgtcttcaaagatccggcaggtgtgatggagaacatcttcggagtgacagaatatctaagaaaggtcattcgagaggaaggtggagatccggacagagagacactttcctgcattaagacaaagaatggatgtacctattttgaggataatgagggacagccgtggagatgttataattatatttcgaattcggtatgttatcagcttgtagaggatccggagcagttctatcagtctggaaatagttttggacacttcttaaaacagcttggaaattatccggcatccagcttaaaggagacaatcccagatttccacaatacggtgaaacggtttgaaaatttggagaaagctttgaagcgagatatcaaaaacagggcgatcacttgcagaccggagattgcgtttgcccttgatagaaagcaagattgtaaggtattagtagaacagcaggagaatggaacgctgccgcttcgagtgacacacaatgatacaaagctgaacaatattttgtttgatgcagagaccggaaagggactttgtatcattgatctggatacgatcatgccagggcttgctgcaaacgatttcggagattccatccggtttggtgcggcgacagcggaggaagatgagcgcgatctggataagatgcattttgatatctctttatatgagctgtatgtgaaaggatatttggaggcgacaagagatgtattgacaccgaaagaagtcgagagtcttccatggggagcgcgtctgatgacgtttgagtgtggaattcggttcctgacagattatctggaaggagacacttactttaagacggcttatccagagcacaaccttgtccgtgcgcggacgcagttccgtcttgtggatgagatggagcagcaatttgcaaagatgcaggagattgtaagacagtacgcataagaaaagaaagccggggtggaagaagctccggctatttgattgggaagaatcaaaaaagaaagagagaagtagatgagaagagaaaaagaacagaaggcactctttcagttgatcaagagtgttttactggaagaaccaataacgatagaggtcgaagggcttgactggaagtatttgcagcagttgtgcaagtatcagaagattgacaatctagtatcctatggaattttaccactgcaggaacaggagaaaatccctgcggatgtggtctgtgcaatgcaaaaggcgcagcagaaagggattgcgagagaggctacccagtatttttctttgcaggagatccaacagaagtttgaggaagaacaaatcgagcatctcccattaaagggagctcagttgaaaaaggaatacccttctcctgatatgcgttttctcacagatcttgatattctgtgtcagaaagagcagcaaggaaagattcaggcaattatggagtcgcttggatatactttggaacatggaggagggcatcacgatgtctatgtgcggaatccttttatgacggttgagattcattgggactgctcaacggagaacccggagctagatgtgcttttggaggacatctggagcaagtgtacccgaaaggagggctttgcatttgcgtatcagatgccttgggaagagtattatgtatatatgatcggtcatatggcaaagcacttgaagtacggaggaattggaatccggatgctgttggacctttttgtgtttgcacagaagaaaaaagacagttgcgactggaagaagatcgaagtgtatctagagagagggggacttttaaagttttccgaaacgatgcatcgttttttacagcaatatatggaggaagacgaatcgttttttgagggaaatattcttttggaacatatcattggcagtggcgcatacggcacgatggaaaatcatatgggagcaaggctcttaaaagtgggcggggagaaaaaacaaagtcgaaggacacgcatacggttagcgctgacaatacttttcccgccactggaggcaatgaaagaactttctccggcagtgagacggcattcgcttttgttgccggtagcatggatttggcgtttggtcacaaagacgatttttgcaaatagaaaagggcgagaggttttaaagagcgttgcggtgaccgaccaggtagatcatatggatcgcgtgtatagggcggcaggactttacgagtaaaagcatctgtgaaaaagagcaaaaaataagatgaataagaagaaaaaatagtgaaaaacacggatgaaaaagagttgcagagatatcagaagataaggtataatttaacggaaattacttgtagaaggggattagaaagataggctagttgcaaaaagtaaaagttatcatagattagtcaattaaggacctggaagcgaaacttccaggtcctttttcagaagggagaagaggaatgcgatatcagattgcggattgcattgtagagtatgagccaatctatgagtttctgaaaaagaagatggagtcataccgctttgatggggatgcgaagacgcagatcacactgacgatgacagaggaactctgtatacagaagcaggcagagcagcctcatctgacattagaagagtgtgaatatatttttgtaggattggaattttaccgcaagcttcttttgcaaggcgggatgatgatccatgcatctgcggtggaagtggatggcagagtctatctgttttctgcggacagtggaacaggaaaatctacacatacaaaacagtggcagaaatattttggagctgagcgggcattgatcatcaatgacgataagccggcagtcagaaaagaagcggatggctgggtcgtgtatgggacaccgtttagcggaaaaacagatgagcagttgaaccgaaaggggaaactgcagggaatctgtatgctggagcgtgggaaaacaaacgagatcaggcgcatggatcctcaagaagcggtgctgcttttgatgcggcagacactcgttccgcgcaggcaggagatggcagagaagctgctggggatgctggatgaactttttcgggaagtcccggtctatcagatgcagtgtacgatttcagaatgtgcggcaaagatggcatatgaaagtatgagaggagaaggaatatgagaatcaaaaatggattttttatgcgggaagtggcaggaaaatatgttgtagtcccggttggagcacagacaaatgagttcaaaggaatgattcagatgaaccagacgggggcttttctctggaaagcgcttgagagggatctgacagaagatgcgctgacaaagatgatgttggatcaatatgagatgacagaggaacaggcgaaaaacgatgtacatacatttgtcaccagactcttagaggctggcattctagaagtgtaggcggaacatacgatgcgcaagaaaatggagcagattcttttagaagatggggaattatttacagtggcatctggggtcagtatgcttccctgcatcagaccgcagaaggacattctgcatcttatccggccggaggggactgtggaaaccagtgaggtgattctctatcgaaggaagaatggatcttatattcttcatcgagttatcggaaaagatacagaagggtatatcctctgtggggatcatcagtggataccggagcatggaattcaggaggaacaagtgcttggagtgctgcgaggattttaccggggagaggattatgtcgattgcagaaaggataggagatatcggatctatgtaaagatttggtgcagttcaatccgagcgagaaaatggatcataagactgacagatctagtgtggagaggatggaaaggattgagagggaaatggaacaaaaaccgataagctggatctatcgatgcagcaaaaaccatctgtgggcagttgcactgttggcaggtgtcagcgcagccattgccggaagtttccttctgcttgcactgatctccagcgcacttcttgatgtggcatccggcagccgacaaggaagcctttggagatattgtctgatccttgtagggctcattggcctccaggcgattctgaatatcgtaaacagtaatatccgtgtccgtgtttcaggcaaactggagatggaactgaagcgcaggatgttcgcggcgattttaaggaaaccgtatctggagatcagcggtattcattctggagagattatgaatcgactgacaagtgatgtagagcttgtagttgcagggattgtcggtattttgccacagctgatctctcttgggacaaaactgtctgtggggctgctgattctatttcggattgattttcgatttacgcttgtgatcttgctgattggggttgtggtatgtatcggaaataggatttacagtgagagatttcgccattttcataaggaagtgcaggaaagtggagggcaggtgcgtgcatttttacaggaatgtatcgaaaaccttatggtcatcaagtctttttccaatgaagaaatgatggaacaaaaactcaccaattatcaggaaatccattatcagataaaaaagaagcggaatgcagtcagcaatctggcgaataccatcgtctatgtcatgtttacggcaggatattatgcggctctggcatggggtgcgattcagatttccagaggattgctgaccttcgggacattgacagcttttctacagatcatcgggcagatccgggcgccgttccgaaatatttccgggctgattcctcaatattatagtatgatcggatcggcggaacgattgatggatttggagcagatcgaggaagaagaggcgtcttccatggaagaggattttgaaaagatttctgaagagatgcaggcgattgtctttgaagaggttggattctcctacgagaaccgaagcgtgctggaacatttttctgtacgtttggaaaagggaagtctgacggcagttgccggtccttctggtgcaggcaaaagcacgatgatgaagttgctgctcggtttgcttcaatgtgaggaaggacagatttattttgatcttgggaagaaaaagataccggcggatgccgggacaagaaagatgtttgcctacgtgccgcaagggaatatgatcttatcaggaaccatccgtgaaaatcttgttttttccggaagacaggtatcggaagaggagatttgtacggcggcaaagatggcatgtatctgggaatatattcaggagctccctgatggattggatacggtgctgcgggaaagaggaaatggactttccgaaggacagatccagaggattgcaattgcgcgggcactcttaagtgatgcgccggttcttctcttggatgaatgcacctcggcgctggacgagaagacagaagaacaagtgttaaacaatttaaaacagatgaaatcaaagaccattttatgcatttcccataaggtggcagcattcgcatgttgtgatcataaaatcgtattagacggatccggcaatgctgagggaaattagacaatcttttggatgggaaagaaaagtgataagaaggagagacaacgaatgcagaaaaaaaagaggatggcaggtgcaatcgccggaattggcttttgcatactgcttggaagtgggatcgctttgtgggaacacttccagggggatgagaaagaacagcagaagaaaacaccggtgtcgaatgaggtggcagagattgagaatctcaatgcacgtgaccatgtgttggatctaaatcatctttttgaagaagaggatgttacctggaaagaaaagagagcgctgaagaaagatgcacagaagcaggcagaaatgtctgacggaaagaaaaaatcagcggataaaaagaaagacactaagaaagatactgaaaaagaaacagagggaaaatcagaggtgccacagaagccgaatgaggaaccgcagcagccgcaggagccaaatggggaaccagaagtgccgcagcagccgcagggaccaaatgaggaaccggaagcgccacaggagccgcagggaccaaatgaggaaccggaagcgccacaacagccacaggagccggaagtgccgcagaaaccgacattgccgcaagtgagtgagccggggtggattacaggaatatactaaggaaggattagagtatgaaacagaggaaaaagagtttgggcatctggatttttttgctgcttttgttctggggacaatggatagttccggtcaaagcatccggacctgagctgcgggatgtagatatgcagatgctgggtggacaaatccgcacgattactccgatgggattaagaatgatcgggtgtatcaagaaatcttatctgcaagaattggagagcagcggtgcagttgtagaatatggaatggttctgcttcctaaaacatatctaggggagcaggaactggaactggaccgcaaatatctttacaatggtgcagtgtacaagccggctaaagtaacggcagttaaaaaattttcagaagatgacgacagaatctattttacagcggttctggcaaatctttcgaaagagcgatataaaaatgattatgctgccagagtctatgcaaagattacaagaacgatttccaatgaagaaggatcttcggagaaaaagacagagattgtatacagtgacgatacagtcaaccgtcaagtctatcagattgcacaggcggcagtggacggaacgacagagacagaggaaaataaagagtggctgcgggaaaacattttgaatccggtagaccagccggaacaaccgcaggaagaagaaaagaaaattccatttgaactcggaaccgtttctggtgttacgctgtatcacaagactggaatcggagaagaagtgggggaagtagaagaggtctcacacttccgtgtggaggagtttaaaccagagcaatatattgtaaaggttgggatggaagatcagccagaagtattttctgagattacaaagttgattgtctcggaggatgggaaagtcagcttcgggttgaaattggacaactatgtgatgccgcagcaagggcagccgcaggcagaggttgttgtggagtttggaactttatcggaaggacaggcatccacgaaatacattacgatgcaggcactggtagatcgaatcaacgcagatccggatgggacttatacactggagcatgatatcgatgccggcatggtacagggagaagacgtgctgatcccggaatttcgcggaacttttgatggaaaaggatataagatcaaagggctgacgacaactttgtttggaacgatttcaggtggtacggtaaagaacgtgaagctggaaaatgtatccattacaaagcagggatcctatggagatgccggcggcggaacgctggcgaacaaagcgatggcaaacacaagtgtggaagatgtccatgtaagcggaagtctgaaaacaccgaacagcagacagctgcttggaggtctgatcggtcgtatggattatgcagcggtcagaagatgttccgccaacttggagattaccggtacgtttaatacgacaggtggattgattggacagatgtcaaatctgagaagcgtcaacaatgggaatggcagcaatattatagaaaattcctatgcagttggaacaattcgtggaaaccagacaaacggtgccatcggaggattgattggatggcataattcgaactgcagcacttcggtcacaaactgttatacaaatgtaagtatggaagtggcaaaatccaatcagaaagagtctggtggatttattggatacattggaaatgcagatggaacgggtatattgaaaaacaatgtttcttacagcagcggaacccagggctataaatttgacggagcatccgaagacacaaagtatagtgcagaaggtgtttctggattatattctatgaaagagagccgattgaaaagggaaagcagccgaaccggggcaacagcattgacgaagattacagagagttccgtcgataccctttccggaaaagaattttacacggcaatggcatggtcggaagacgtatggaattttgcaccgctgcaggaagggaagacaccggtattgcagaatggggattccaatatgacaacgatgctgcagatgaaagaaatttcatcggtggatgaccttcggaagatcaaggatgacctgggcggcgcctatgttctgacaaccgaccttgatgtatcggagatcacagaaggcaatgcgatcatttcgggtagcttccgaggcctgttgcggggaaatggacatcagatcatcggaatgaagcttccgttgtttgagacattggcaggagcttcggtggaggagctgaagctgacgcagggatcgatcgggaagaaagataccgatcaggttgctgcactggctaaagtttcggagagcggaacgacacttagacatgtctatgtaagagatatgagcatcacaggaagaactacggtaggtggtatgatcgcagtgatgaagcagacgacggcagaagcttgttccgttaatgcggaggtgaccggagggaatgcaggcggatttgcagcggagattttggaaggctctgtcatttcaaactcttatgcaaagagagctgtggatctagacagcttccagacggcagagggtccgcagggcggatttgcggcaatcgtgaagcggtcacagctgagtaaaaactttggacaactttcgtggaaaaaggcggaggaaaagaatgagactccggctacagaaggtgttgtcggaacttttatcggggaaagtggtacgggagaccagactccgacaaagatcgaacacaatatctcttttggaccggcttcctatgcatttgtaggaaatcagcaggggattgccgaaggagagaactatgtaggaaactacgaatatcgtgagggagatccggtatcttcggtattgcctggaaaaatcgaacaggcatctgaggtacagatcaaaagcaaggaattctatttgcagacactggaatggcaggaagacatctggtatttggatgatgttgtcggaggaaagagaccgcgtctgcaggcagaaggagatgtgtacgggacggaagaaaatccagtttcggtagaagcgccggagatgatccaggaagcgatcgcagtgcgaagtcaggaagaggctgctttgtcaagatcactggaaggaattacaggctatcgggaagaccgaaaattactgtatgaaaatttacagttgtttatgccattctaccagagggaacagattgttctggatggaaatcacgtagatgtgtcacacattttaaatcagaagagagtgctggcagtctatccgatggatgaacaaggaagaaggattgtagcgctgtcagataagaccgtgaatcaggtaaagaaactgagaattcaatttgcggatgaaacgacaccgctgatctacaatatgtcttatatagatactcgggcgaacattgcttcttataaggtgtcacagattccggtacactttaactttaaaaattatgtagtgaatacaacatcagtgcagttccagaagttgctggaaacagcaaagacatatgaatttgaccgggatattgagacaagagtggcacaaaaggacagtggttctgttttggatgtatatcggagaaattataatgaagttgtcaaaacggagatggagcaggtcctcgtttcgatgtcggccacaaatgcacagtatccgataaatctggaaaatgagatagcaaagaagatcgtgaccgatcacttccttaccagcgagtatctgaaagatttcctctatgcgtataactatttggatcgctggtatgactttgagatcggaggtatcaatctcagggatgtcgtcctgtttgacaattctatcttaaagacagggaaaaaagtgcgaaatcttcctacagagattgtgaaactcagcagcaatggcgggcgtcagggaaataatacgccatcgttctatattaaccgcctctcagcttatacagggatttctaacgtggcgtcgttcgtggaatactttatgaaagagtatgctagttatgcggacgtcaatgattggatcatcgataatttccagagtgggttcattgtagaggcgcgggcgaacaacccgaagattcagtcaagattatggaagattttgaaaaacaatacggtacagcggaatcatgaactgatccttccggtattatcgtataaaacttctaaaaacttgtatctggcatcgttcccatccgcgctgatttatggaaatctggaaatctacagtggatatcaggatacagaagcatggagacagcagaaaaaacaacaggtgattacgcaggtgaatcacttcaagacaagttatgataatttcgttgatgttgcagaaaatggggcaaattccattaacaacagtaagtttttgatcgtggattcttctgccaataagaatcataatcaggatgtgttcaaggaattttataggccgctgcagacactttggcagcatagtagtggtgcggtagcggtgattttcggaaatccaaatctggattacatctattataatggttccaatttcatcggagatctgactgtcttaaaccacgagatgggacatgtgacagatatgtggatctggatggagaacaaaggaaaacgaccgggacgaaatggcgaggactattccaatggatttgccaatcaggccaacgtagactataatatgaactttatgaaaacctatgcgagagacggatcgatgatgacaaatctgacaccagatcggatcaattctccggaggagtttcagagttattataaggaagtgttcgatgtcatctatacgttggattatttgcaggggaaggcgtatttacaactgactccggagcagcaggcaaggattacactgcagcaccgatacggaacaaccaacaatcatcagaagtggaacagtgcaaacagcacctggcggacgattggtgccggagaattagaaaatatgaatctgaagacattggatgatctgtgggacaatcaactgacaatccggccgggacatcggttggatctgagaagtttcaatgaggtaggagtcaacaatttaggtgcttatcagatcgacagagcatgttatgcgagctggtatgtcccgtatgtagataatggtacaccgaatgcacagacatttcgtcgaaatgggtatgagctggctggattgtatggatacagcaacggtctggtagagtacctgagtggaagaacaagaacgggggatctgcaatatttccggcagaaaacaggaaatgcagactttacgtttgagtcctatcgaaaaaataaaaacacagaaatcgagacaaagatccacgagcagaaagagcaggggaatgcgtactttgatgaagaagctttgattcaatatctaaagcaaaacatgatcaattatggaaatgagatcggaagtggagcttccaacggaaacaatacactgaatcatatcaaggaatccagagagaatgtcttccgttatctccagaggattacggatgagttccggactccggtttacggtgggacagagacgagaaatgccgtatccatttctacagcagaagaacttgtccagaagcttagagagaatccaaatggattttatgtgttggaaaaagatatttccatgaaaggcatccaggcaagtggagaggtgtatgtggacacgactttcattgggaaactggatggcaatggacataagatcacagatgcagcagtgccacttttgcgcagaacagccaactcgtacattgcagacatagagatccatgacacagcagggacaaagaaagactgggttgcacaacagaagcagtttacgattgttgtaaaagaagaacaagaagagaccgtacaggagattagaacattagaagagctccggactctgggagaaaatcgctatacgaaatatgtgctgaaaaatgagatcgatgcttcttcggtgacagatgttgctgtgatccaaggtacattcacaggagagctggacggaggagagtatgcgatcacaggtcttcaagtaccgctttttgaaaaagtacaaaatgcgacggttcgtaatctgaagcttacttctgtaaacattgcaaacagcgaaagcaaaaatgccgcagtggcaaaagaatcgaaccattcgacgtttgcacggctgagtctggaagatatcaagatcagtggaaaaagctacaatgctgctgtcgtaggatacgattatactggttctgacttttcacaaatccagattcgaaatgcgcagatccaaggaaccggaaattacaatgcggtctttgcagggcgcgcttctggttcagagatcagtgaaattgcagtgatcgacagtaaggtgacactgagcggaacggattgtggaggatttatcggagctgggaaaagcttaaatatccgtcaggtgtacagtggtgcagatatggtggcagagaactatacagatgagaagaatcggacgaatagtgcgggattcattggaaatctcggaggaaaaagcaatgtggaaaatgtatttgcggcaggaaaggtagacaatcgaacagagacgcctctttataacttcctgggaacaccggaagtgttagagtcgatggtgaagaatgcgtttgtgcttgaaactgccgggggaatctctcacacgacagaaacgataggaatcctttctgcaatttcggaagaacgcacaaaagaggaagaattttatcgggcttctatgcacctttcggaagaaatctggaatctcagcttagtagctatgaagggatatccggaattaagaggcatggagaaaaaagaaattatagagatccatacaccgaaggactttctgaagatgaaagcattccctggacaggaatatcatctgaaagcagatatcgatctgacgggggcagaaggcgaacgcggtgtcataccggaatttacaggtgtgctggatggacagcactataaaatcaccggattgcaaaagccgctgtttgatcaactgaagggaagtgtccggaacctggcaatagagggaagtactgtggagctgtcagacactccggagacggtgagcggaattttggcaaatacaatggaagatgctgttgtagaacaagtgctgcttcacggaatccgagtgaacagtgcagcaggaaaggctgcggcagttgcgggaactgtacgcaatacaacgatgaaaaatctttttgtagaaggtgcagttcaggcggcttctacggcagccggagttgcggtgacgacagaaggagctgtttttgaaaatatttatctcaatgtggatgtgacaggggcagacggagccgggatggtaggaaacggtgtcggcgaaaatacctaccgcaatatttgttcggtaggagatgtggcagaccatatgcagaagcttggtggaaatactgaacagtatagcaatgcatatgaatttgcagccggaaatggaatcagccagtctggcgaaggtgattttataagaccgataggcaaagaagtgtggacagcggaattttatacagaaacactgggactggatgcttctgtgtgggatgcggcgcaggcagctgaaagaggatttgcttcgttgagagagtttgcggtcgagatcaatccgatgcgggcggagatccatacagtggcagatctccagaagatgaaccgagtgccggaaggaaaatttgttctgacagctgacctgaactttgcagatgtagaaactgcttatgtgacagaaacctttacaggaagtctggacgggcaagcacatggcgtgagtggaatcagaggtccgttgtttgcggtactgtcaggaactgtagaaaaccttcgtttcagaaatatttttgtgaaaagcgaagatgccggcgcaaatgtgctggcgacggagacgaagaatgccacggtaaaaaatgtacatttcaacggaatcactttaaacggtcagagttacacagggctggttggaaaagatcagggttccacctttgaacagatcagtgtacaaggtgtggatctgacggcaaacgcggcttatgcaggggtgatcacagcccaagcagctgcatccagaatgtccaatctgcttgtagcagagacaaagatacatacatccgcaaatgaggtaggtggacttgtcggaagcgcagatgcggtgacgattcaaaaagtatttgcagatgcagaattgcacatgccatatcaggcggctccgcaaaatacagcggcatttgtcggaagcgtgacaggagaaagtgcaatttcagaatgtgtggtggctggcggtgtgtacccacaagatccgggaagcactcgttacaaattgatgtatatgaacaatccggatgatattaatgaattgaaggcatttaaaaactgttttgtcaatacggacacaccgggataccagattgtaggtacagatccgcagggagtgacgcaggatagtctgcaaagtgaagcattctatcagtctgatttgaaactggatccgaacatctggaactgggctgatgcagcaaagacgggttggccgagactccatgagatggatgcagagggaatcagacctccggggacagaaggaacaccggcagaagaaaccccattacagacgacggttccgtctggatatgagccgatccatacggccgaagaactgctggcggcgaaaaacagttccggaaaatatattctgatgcaatcgatttctctttttggggaaaaggctgtggatggctctttccttggaaacttcagtggagaactggatggaaatggactgacgatccgtgaaatttccggggcaccgctatttgatcgattgtcaggaactgtgaagaacttaaaggtgacagacgtaacagtagaacggtggaagagtgaccaaggggcgaatgcgcttgcgaagtctttacaaaatgcgaaggtttctagattgcagttaaagaatatccttcttgcaggaggagacaatacaggtgcacttgcaggaacggcacaaaacacgacgatcagtgaagtgtgggcagaaggattgaatatcaatccatatggaccggcttttgctggaaagacagatttgatggtcggaggcctgatcgcgcagttgaatggaggagttcatgtcaacgacagctatgcggcaggagaaatcactgttcgctccaacacgcagggaggtgtgtttggctacaacaactacggaacggagaacactgtcaaacaggtcgtttcaaatatgcggacaaaatccacatcaccacagaccgatggagctggcttcataggaatggtcggttttgacggaagtatggcaacgtggatggaaaataacattgcaatcggggaagcaggagaaaaccgggcacagggaagtgttggggaggcctaccgatttgcaacaaaaggaaattcgaacaccgcgatcgaattcgggctgaagaattgctatgaggcagcggtgagcggaaggagcgccgcagtttcgggatacttgacagaaactaccgagtataaaaatccagatttttatcgggatactttgaaatttgacagcactaaatggaacttttcttccgtggcagaacatggatatccttcccttgtatggatcgcaggagaagaaccgcttccgccgttgccggaaggatcggcagtgaccgaacatccactgcgcaccgaacatccatctgcggaatatattcagattcgtacaccggaagacttgatgaagatttcagagaatccgggtggaaaatatattttgatgaacaatatttccatggagcaagtgagattgccggaaaatcagacatcctacatcatgaaagcattctcaggagaactggatggaaacaatcaggtcatccacggcttgcgagcctctttgtttgacctcattcgaggaaggtcagtcaatgccaaggcgactgtgaaaaatctccgcatacaaaatgtctttgtaactgcaggcgagaagacggagtggggatatacaaggaaagcagaagctaatggacttgcacgttcagtggagtatggtcatctggagacgatctatatgaatcatgtaaaactgaatggaggaacgaacaccgcatcacttagcggacttgtgtatgaatcctatgtcggaaaaatctggttagagggaattgacattaaccgggagattgctccggcagaactttcgaattttaacctggtcggaggagccattgggcagctgtcagggtatcgttccaaatttgaagattcctacgtgcaaggggaaattgttatggataataaccagcaaggcggcgctgtgggagagattaaggcagccctgataagaaatgtcatcagtaacatggaggcgagatccaaccaaccggcgacatggagagataagagtggatttttaggaagcatagatacttttggtaccaacgggaagaattggtgggtagacagatgtattgccatcggaaatgcaggagccaattataagtttttaggaaaatatcagattgaaacgatagaagcgacaaatcttacaaaatgttacgagctctccagtgcaacaggaacaagtaatgtttcggaggcgacgattgcaaaaggaaccttgctggctgctgaggaacagcagaaatacgacgtctcgttctatcgcgatgtcttgactttcaatggcaacgaagagggagctgatccagacgcgtgggatttcggttcggtatccacaaaagggtatccgacattaaaatggctcttgacttatgacaatttgccgattactatagaggaaccagagcatttggaaccatcagaaaatcaggcggaagcgcagccggaagaagagcatacattggagctgccggaagttgtacttccggaagagcagccggtattgccggaagaggaagcgctgcaggaggagctttttggagaagaagagatacttccagagtaggaagagatacaatcagtagaaaggatgaagcagaatgaaaagacagtatgaagcaccagcattagaaattatcgagtttgacggagagagcattattacgatgagtggagttgagagttcgtcacagaatgataatatgcttgatgttggaggaactggctggggagaataatcctagtcaggaagagatgacataagaaggaaagtgagacggcggcagacttttgtctgttgccgtctctttctgtgagcagcaggcagaacgcctcacaaaattttcttcgattgattttcttcttttcttatcgtataatgttttatacgagtgaaaacagagaaagagagtgcagaaggaatatgaaagcaggaaaacaaaggatggcattgctgaggattgtggcggtagtagtcaccgtcatcgggatcattggcattgctgcggcgctgtgggcagagaagaaaaaggagcagcagtgggtttcgagcaatgcagaaattaccgcacggattaagccgtttgaggaggagcagcgtgtattagagaagcaggataaggaatggctgcagcggttggagaacacgagaaatggagggacttgtgttctgcttggctttgcaaatgcaaatcaaacgcttacacaggatacactccagatcatgacagaatatggatatcgaggaacatttccgctgcaaaatgggttagtaccgggaagctcgccggaactgatgagtatggaagcatttcatggcatgcttggaagcggatgggaatatgtgttccagacagagtctccgggaggagaagatgaggagcagtgggtacaacaattggatgcccagattgcagcatggaatggtgcggggatcgggacaccggggggatattttttctctgaggggaaaagttccgagagcaaggaggaagatctgaaggggcgaggattttcggtatgggcggttccgcagcagtcaggaggctatattgggaatctggaagatggtgtacttccggtgaagactgtggtagtgtcaaagcatgcaatgacgatggagtctgccctcacgaatgcgataagcaaaaagaagtcggtggcatttttgtttccggaagtgacttctcagatagaaggtgacggggaagccattacacctgagacgtttcgaaagcttctgtcagagatcaaagaaaaggagatggcaggagccttgcaggtgatgacctattatcagtactaccagtatcgcgtgcagtgccaggcggaagcagaagcattgaaattggagtatgagattttttgccaacagaaagatgcaagaatcaaagagctggatgaggaaatccgaaacgtactggaagaatatcgataaaatgagaaatcccgtcgggaagagattccatttttgataaaattatgatatactggtaacgtaagagtcctggtatgtctatatatcaatgacaaaagagaataaggagcgagacagatgaagagagtattactgaagctcagcggagaagcgctggcaggagataaaaagacaggttttgatgaggcgacctgtatcggagtcgcagagcaggtaaaacagcttgtagatgcaggaatccaggttgcgatcgtgaccggaggaggcaacttctggagaggaagaacgagcgagacgatcgaccgcacgaaagcggaccagatcgggatgctggcgacaatcatgaactgtacttatgtatctgagattttccgccatgtgggaatgaagacagaagtatttactccatttgtatgtggagcattcacgactctgttctccaaggatgcagctgtgaaagcgcttgaagaaggaaaggtggttttctttgccggaggtaccggacatccgtatttttctacggatacaggtgcggttctgcgtgcgattgagatcgaggcagaggcaatgctcgttgcgaagacgatcgatggcgtatatgacagtgatccgaaggtaaatccggaggctgtgaagtacgatgagatttcgatcagtgaagtgatcgagaagagactggccgtgatcgatctggcagcatctatcttatgtatggagaatcagatgcctatgctcgtgtttggtttgagcgaggagaatagtatcgtagagacgatgacaggaacatttacaggaacgaaagtaactgtatcataaaaagaagcggaggaatatagcaatgaatgaaagactgaatgtatttaatgaaaaaatggagaaatcttacaacagcctgacaagtgaactggcaacgatccgtgcaggacgtgcaaacccacatgtactggataagctgacagtagactactatggatcaccaactccgatccaacaagtggcgaatgtatctgtgccggaagcgcgcatgatccagatccagccatgggaaaaatcaatggtaaaagagatcgagaaggcaatcctgacttctgatatcggaatcaatccgaccaatgatggtacagtcatccgtcttgtatttccggagctgacagaagagcgaagaaaagaacttgtgaaagatgttaagaaaaaaggagaagcaggaaaggttgcagttcgtaacatcagacgtgatggaaatgatacgtttaagaaattaaaaggaacagaggtttctgaagatgagatcaaggatctggaagatgaattacagaaactgacagataagtacatcgcacagatcgaaaaagctgttgaggcaaaatcaaaagaagtgatgactgtctaagaagaaattctgtgtgaggcacacagtgttttatttctgatctgagacaacagaagaaaaaaaggaagataagcaagggggatgaagtgacgtctgaccttgcttatcctattagagaggagaatttgattagatgaacgtaccacagcatattgcgatcatcctggatgggaatgggcgttgggcgaagaagaaagggatgccgagaaattacgggcatgcccagggaagcaaaaatgtagagcggatctgtgaggaagcatataagatgggtgtcaagtatctgacggtctatgcgttttctacagagaactggaaccggccaaaaggggaagtagatgcgctgatgaagcttctcagaaattatatgaagacttgtttaaagactgccgagaagaaccgaatgaaagtgcgcgtgatcggagacttgacaggacttgatgaggatatccgcacaaggatcttagaacttgaggaggcttcgaagaataacgatggtctgaacttccagattgcgatcaattatggaagcagggatgagatcgtccgtgcagtgagaactcttgccaaggactgcaaagagggaaagatagaggcggagaagatcacagaagaggtgttggagtcttatctggacacacatgggattccggatccggatcttttgatccgtacaagcggagaattgcggctctccaactatctgctctggcagcttgcctacacagaattttattttacagatgtgttatggccggactttacgaaggaagaattgcgaaaggcgattgaacaatataatcgccgtgacagacgttttggaaagacaggggaggaagatacaaatgtttaagacaagattgatcagcgggattctgcttgtgatcgtggcgctgtttgcaatcgtcagcggaggagatattctgtttggaatccttctcgttctcagtctgattggaatgagtgaactttataaaattgcagatgtgcataaaaaactgcttggtgtgacaggctatgtggcagcagcagttcactatattttgctgcacagagtagcggcgggaaaagcgccgggagcatttgcagcgggccagatcaatgagattacctgcatcggaatactctttttgatcgtgttgatggcagtttatgtgttttcttttccgaaatatcgctcagagcaggtgatgctgacttatttcggaatgttttatgtggcagtgatgctttcttacatctatcagacaagactgcttgcacacggggcatttctcgtaggacttgtgtttatctgttcctggggatgtgatacttgtgcgtactgtgtcggaatgctgatcggtaaacataagatggctccgaagttaagtccgaagaagtctgtggaaggtggtatcggtgggattgtaggcgctgcacttcttggagcgctctatgctgcggcaatcaattatttcgcaccggatgtgcaggcaagtgcattcgcgtatgcatttatttgtgcagtgggcggtatgatctcacaagtaggagatcttgcagcatctgcgatcaaacgaaaccatgacatcaaggactatggcaagctgattccagggcacggcggtgtgctggatcggtttgacagtgtgatttttacagcgccggtaatctattatctggctgtgacgataatgaagtaggtgaataagatgaaaaagatagcaattttaggttcgacaggctccatcggcacacagacgttggaggttgtgagagaaaataaagatatcgaagtatcaggactggctgcggggaataatatagaacgactggaagcgcagattcgggaatttgcaccgaaagttgtggcagtctggaatgaagagcgcgcaaaggaactggcagataaggtcagagatcttgatgtgaagattgtatctgggatggaagggctgattgaagtatccacacttccggaagtggagatcttagtgactgcaattgtaggaatgatcgggattcggccgacgattgcggcaattacggccggaaaacatattgcgcttgccaataaggagacacttgtgactgcggggcatattatcatgccgctggcaaaagaacacggagtatcgatccttccggtggacagtgaacacagcgccatttttcagtctttgcagggcgggcaggagcgggcgctccacaagatcttgctcacagcttccgggggaccattccgcggaagaagatgggaagaccttcagaacgtgcaggtggaggatgccttgaagcatccgaactgggagatgggaaggaagattacgatcgattcttctacgatggtcaacaaagggctggaagtgattgaggcaaaatggctctttggagtggaggtagatcagattgaggttgttgtgcagccgcagagtatcattcactccatggtagaatatgtagatggcgcggtaatcgcccagcttggcacaccggatatgaagttgccgatccagtatgcactctactacccggagcgcagatatctgccgggagaccggctggatttcagagggcttgcacagctgacctttgaggagccggatttggagaccttctatgggctgcggctggcatacgaggcaggaaaggcaggcggaagccttccgacggtgttcaatgctgcaaatgaaaaggcagtgagtaagttcttgaaccgggagatcagatttttggagataccggagatgatccaggcatgcatggaggcgcacaaaaatatcgccaatccttctgtggatgaaatactgcagacagaggcagaaacatatgactatatagaaagcaggtggtaacagatgggcattcttcttgccttgttactttttagtttcattgtaattgtccatgaacttggacatttcttactagcaaagaaaaatgggattgatgtatcagaattttctcttggaatgggaccgaggatcctaagctttgagcggggaggcacgagatactcgtggaaacttttgccgtttggagggtcctgtatgatgggtgaagatgagattgacgatcagtcggcaggaagctttaacagcaaatcggtttgggcaaggatttctgtcatagcggcaggaccggtgtttaattttattctcgcgctcatctttgcggtgatccttgttgcctgggttggttatgatccggccgttgcagacgatgtaattccggggtcagcggcagaggaagccggattgcagaagggcgatgtcattgtgaagatgaatcataaggatatcaatctctggagagaggtacaggtatataatcaaatgcatcagggggagaccgtcacggtcacttatgagcgggatggaaaagaacatcaggtagatatcaagccgcggatggatgaagaaacgggaatgtatctgcttggtctgaccggaaaggcacaaaatgagaaggcggacggactgaaggcgcttcagtatggagtctatgaagtgaaatattggatctgtacgacattggatggcttgaagatgcttgtcaccggaaaagtcggtcttgaccagatggccggcccggtaggaattgtaaaccttgtagatgatacttatgaggctgcgaaaccggcgggaatggcaattgtattcctgaatctgatgaacatcgggatcttgttatcggcaaacttaggggtgatgaatctgcttccaattccggcgttagacggtgggagactggtatttttgatcctggaagtgatccgtggcaagcggattgcgccggagaaagagggaatggtccattttgcaggatttgtgctgctttttggattgatgatcttgattttattcaatgatgtgaaaaatctgtttctgtaagatttttccagatcaaaggatatgtgcaggcgctcttttatagggcgcctgttgtgagagaaaattaggattttgtagaagttggtcctatgaaataaaaaaagaagtaatcacatgacggtatgattacttctttttatttctatttgattaagctttctaattaagcaattccgttaacagcttttgttaaacgagaaacttttctagcgcaagtgttcttgtggtaaacacctttagaaccagctttgttgatctcaacgatagcagcttttaaagcttcttcagcagcagctttgtcgctgtgagcaacagcagtctctacttttttcacgtaagtttttacttttgatttaattgctttatttctagcagcttttgtttcgtttactaaaattcttttttttgcagatttaatgttagccaaatcgtacacctccaaatatgtgatttttttattttctattcgttagggtaattcggcagattcggacacggacgttctgtcgaacacacttatttagtttaatggatagaatctgttctgtcaatacatatttcccatttttttgtaaaaactattaaaaaacagagtggaaatgaggggaagaatgtaatgttggaaaattataatattcgtacggacttggcgctggagacaagggaacggtttgtgtcggatcatgtggagattccgggtgtgagtgtggaagagacttacgacgaggagagagagatccggacgacccgtgtcgttgttgagacagagaatggagcgaagatgatgggaaagccagtcggcacatatctgactatcgaggcgccgaatatggctgtgccggatgaagattatcacagggaaatttcaaaaaagctggcagaggatatcaaagaactcgtaccggaacgaaaggaggaagtatctgtcctcgtggtagggcttggaaaccgcgaggtgacaccggatgcactcggaccttatgtggcagatcatctgcatgtcacacggcacatcgtaaaagaatatgggaaatatgcgatgggaaaagatcaagtatatcttgtcagtgctgtagtgcccggggttacggggcagactggaatggagacgctggagattgtgaagggggttgtggaggaaacggagccggattttgttgtggcgatcgatgcgcttgcggcgagaaacagtaaaagattaaaccggacgattcagattacagataccggaatctgtccgggatctggtgtgggaaaccacaggctggcattgaacagtgagacgttgggtgtcaaggtgatcgggatcggtgttccgactgtggtagatgcggtgacgatcgtcaatgatacgatggaaaacttcatcgtagcgctggagtcttctgaactgctcaaaagtgtaggggagacgctgcgcagttacaacgaggcagagaagcaggaactgatccgggagctgatcgctccgcatctgaacgggatgtatatgacaccaaaaaatattgatgacactatcaagcgggtgagttttacaatctcggaggcgttaaatatcttgttttcggaagggacagcctcataaattttttgtttggctcatatagtttaaaggcagggcgattgtggcaggatggacaagagcagcagaaaatagtggggaagtggatgcgtgaaaaagagatggaagctgacagagacaggaagtatgactggaaagatcgcagtctttcttgtgtttttatgtattttgcaaaatatggggacagtttttgataaaaagacagtggcaaaaagtgtgcagaagagggcagaggagcgatacctgccttctctctcctatttaaaagcggaacctgttcttgctccgggggagtggatcgcaaagcaggcgatgcagattttgcctgccggtggatatctgcggcgccagaaagtttatcgggcatcgctggaggatgaagaaacgtacgagatgatcctgaaaaagcaggcggaggatgaaaatgaagtgggggcagatggaaaactggtgaatccagagaaagcggtaacggtggaggagccgcccaagatggctcaggttcccccggagatgtctatagagaagctgcgggattttgattatctgctcagcaatttttatacggtggacagtgcgactatgattggaccggatcagttgaatgcggatgacctcctgtcaaggagcatgaagattgaaaagcagggagatgcacccaaaattcttattttccatacgcattcgcaggaagctttcatcgattccgtggagggagatacagacacaacgatcgtcgggatggggaagcttcttgcagagcggttaaatgcacttgggattccgacgatccaccatccgggtgtctacgatctgatcaatggacagttggaccggagcgcagcatatgagtatgcggaggcgggagtgcggccaatccttgaagagcatccaagtatcgaagttgtgatcgatcttcaccgggacggtgtgggcgaggatacgcatctggtgacagaagtaaatggaaaaccgactgcgcagattatgttttttaatgggttgagccggacaaaggataacggagatatcgcataccttccaaacccatacatacaggacaatctggcattttcacttcaaatgaagctggcggcagaacagatgtatcctggatttacaaggaggatttttctccgtgggtaccgctacagtctgcacatgcgcccgaagtcgcttttaattgaggcaggggcgcagacaaacacggtagaggaaatgagaaatgcgatggaactgcttgcagtgacacttcagaaagtgattgtggaaaatccataaaaacaggagtttagaagtagaaagaacagctgttcggaaataaagttgaaaatcctgaacatttgtggtagaatgtgtgaagctttgataaagaacgtgaaaggacaggggtaaatggctaagaaaaatacatatgatgcagatagtatttcggtgctcgaagggctggaggcggtccggaagcgtccgggaatgtatataggaagtgtgtctacaaagggactgaatcatctgatctatgagattgtggataatgcggtggatgaacatctcgccggattctgtaataagatcagtgtttttttagaaaaagacggttcggctacggtggaggacaatggacgaggagttccagtcggcatgcaccagaagggaatttctgcagcgaggcttgtctacacgaccttgcatgcgggaggaaagtttgatgattcggcttacaagacaagcggtggactccatggtgtcggatcttccgtagtcaatgcgttgtcagaatatatggatgtgaagatcagccgggacggcggggtacaccatgaccggtatgagcgggggattccggtcgtagagctggaagacggtcttctcccggtgatcgcaaagacgagaaagaccggtacacttgtgaattttttgccggatggagagatttttgagaagacaaagtttaaggcagatgaggtgaagagtcgtctgcatgaaacggcgtatctgaatccggaactgacgattatctttgaggatcggagacgagagcagacagaacatattgagtttcatgagccggatgggatcatcggttttattaaagatatgaaccagaagaaagaggtcatccatgagccagtctattttaaaggggaagcagaaggcatcgaggtggaagtggcatttcagtatgtcaatgagttccatgaaaatgtgcttggtttctgcaataacatttacaatgcggagggcggtacccacctgactggatttaagacgacatttactacagttatcaaccaatatgcgagggagcttgggattttaaaagagaaagattccaattttaccggagcggatattcgaaacgggatgacggcgatcgtctcggtaaagcatccggatcctagatttgaaggacagacgaagacgaaacttgacaatccagatgcatccaaagctacgggaaaggtgaccggggaagagattgttcgctactttgaccgaaatcttgagacgttgaagaaggtaatcggctgtgcagagaaagcggcgaagatccgcaagacagaagaacgtgcaaaaacgaatctgctgacgaagcaaaaatattcgtttgatagcaacggaaagcttgcaaactgcgagagccgtgatgcatcaaagtgtgagatctttatcgttgagggagattcggcgggaggatccgcaaagacggcgcgtgaccggatgtatcaggcgatcttgccgatccgtggaaagattttgaatgtggagaaggcaagcattgataaagtgctggcaaatgcggagatcaagacgatgatcaatgcgtttgggtgtgggttttcagaaggatatgggaatgattttgacatcagtaagctccgctatgataagatcattatcatggcagatgcagatgtggacggagcgcatatttctacattgcttctgaccttattctatcgctttatgccggagttgatctttgagggacatgtctatattgcgatgccgccgctttacaaggcgatgccgaagaagggtgaggaagagtatctgtatgacgataaggcactcgaacagtaccggaagcgccagaccggcccgtttactctgcagaggtacaaaggtctcggggagatggatgcagagcagctttgggagaccacattgaacccggagacaagaatgttaaaattggtagagattgaagatgcgagaatggcatctagtgtgacagagatgctgatgggaagtgatgttccgccgagacgtgcatttatctatgagaatgcggcagaggcagaactggatatatagttaggtgaggtaaaatatgaacgagcagcaagtgataagaaccgagtattcggatgtgatgaagaagtcttacattgattatgcgatgagtgtcatcatagcaagagcactgccggatgtccgggatggtttaaagccggtacagagaagaacgctctatgatatgtatgaacttgggatcagatatgacagaccatacagaaagtgtgcccgtatcgtcggagatacgatgggtaaatatcacccacacggtgacagttccatctatgaggcgctggttgttatggcgcaggattttaaaaagggaatggtgctggtagacggccacgggaatttcgggtcgatagaaggggacggcgctgcggcgatgcgttatacggagagtcgtctggccaagatcacgcaggaagcgtatctggcagatcttgataaagacattgtagattttgtgccaaattttgacgagacagaaaaagagccggaagtgcttccggtcagaattccgaacctccttgtcaatggtgcggagggaatcgcagtcggtatggccacgagtatcccgacacataacctgggtgaggtgatcgatgcagtaaaggcatacatgaggaacaatgagatcacaacggaagaacttctgacatatctgaaggggccggatttcccgaccgggggcatcgtagtcaacaaagatgatctgccatccatctatgagaccggtacaggaaagatcaaacttcgcggaaaagtagaggtagagaatggaaaaggcggaaagaaacgtctggtcatctctgagattccttatacgatgatcggcgcagggatcggaaagtttttgaacgatgtctgtgcactggtggaggcaaagaagacaaatgatatcgtagacatctcgaatcagtcttctaaagaagggatccgtattgttctcgaactgaaaaaagatgcggatattgaaaacctgaaaaacatgctctataagaagacgcgtctggaagatacgtttggggtgaacatgcttgcagttgccgatggaagaccggagacgatggggctccgtcagatcatcgaacaccacgtagattttcagtttgaactgatgacgagaaaatataagacattgcttgcaaaagaacttgcgaaaaaagagattcaggaaggtctgatcaaggcgtgtgatgtcattgacttgatcattgagatcttaagaggcagcaagtcgatcaaagatgcgaaggaatgcttgatccacggaactgtggagaatattacgtttaagacagcggcatccaagaaaaaggcagcaaaactgtgttttaccgagaagcaggcaacggcgattctggagatgcgcctctataaattgatcggtctggaaatcgaagcgctcatgaaggaacatgaagagacgttgaaaaacattgaaaagtatgaagatatcctgaacaattatgattcgatgacaaatgtgatcattgacgaattagaaggatacaaaaaggcttatgcaagagaacgccgcactgtgatcgagaatggaaaagaggcaatctatgaagagaacaaggtggaagaacaggatgtgatcctgcttctggatcgcttcggatatgcaaagactgtggatgtagcaacgtatgagcggaataaagaagccgcagacagcgagaacaagcacatcgttccttgtaaaaatactggaaaagtttgtatttttacgaataccggaaagatgcatcaggtaaaagtctcggatattccatatggaaagtttcgagataagagtgttccgatcgataatctggggaactacgacagtgcgcaggaagagatcgtatatctctgtgcggaagaagaattaaaagatgcgaaactgctatttgtgacaaggcaaagtatgctaaaacaagtggccggagaagagtttcttgtatcaaagcggacgactgcggcaacgaagcttcaggaagaggacgaagtcgttgcgattataaaggttttggaagagcagaatatcgtgcttcagacggaaggaggatatttcctgcggtttcttcttgcggaggtgccggagaagaaaaaaggcgcagtcggtgtgcgcggaatgaagctgcaaaagagtgatcggattgagcagatttatctgtttaccgacggggttgacacaaagggaagttatcaggaaaaagaagtttccttaaaccggctcaagttaaataagcgggatggaaaagggacgaagacacgattataaagcgaaagcggcaaaaagcgcttgcttttcccagagagttgtgctatgctctttaatagattgatatgtaactgacagaagagtgggcaagacgtccactcttctttgtatcatgcagatttgtcagagacgaaagaacaagaacagaaaggaagagatgatttgtcaaaaagagaagtatatgaacagaaaacagaagaactgattctgccgatcgtggagggcaatggatttgaactggtagatgtggagtatgtaaaggaaggaagcaactggtacctgcgcgcttatatcgataaaccgggaggaattgcagtagatgactgtgaagtagtcagccgtgcattttcagagattctggaccgggaggattatatcgaggatacttatatttttgaagtcagctctccgggacttggaagaccgctaaagaaagagaaagattttaaacgcagtctgggagaagaagtggagatcagaacgtaccgtgcgatcgacagacagaaggaatttaccggtattttaaaatcgtatgacaaagacactgtcactatcgaatatgaagatggtgaaccgaagacatttgagagaagcgagatcgcattgatccgtcttgcacttgatttttaaacagttaggaggaaatagaaatgaacactgagttattagaagcgctgacgatcttagaagaggaaaaagacatcagcaaagagaccatgttagatgcaattgagaattcattgatgaatgcctgcaagaaccattttggaaaagcagataacattaagatcatcatgaacagggagacatgcgattattccgtatttgcggagaaagtcgttgtggaggaagtagaagatgaggtgatggagatcagccttgcagatgcaaagatgatcgattcaaaatttgaacttggcgacattgtccagattccggtagaatcaaaggaattcggaagaatcgccacacagaatgcaaaaaacctgatcctccagaaaatccgcgaggaagaaagaaaagtggtttatgaccagtattttgaaaaagaaaaagatatcgttacaggtatcgttcagagatatgttggcaaaaatgtaagtattaaccttggtaaggcagatgcgatgctgacagagaatgaacaggtcaaaggagaggtatttaagccgacagagcgtatcaaactgtacgtggtagaagtaaagaatacgacaaaaggaccgaagatcttagtttctcgtacacatccagaacttgtaaagcgtctgtttgagtcagaagtggcagaagtcaaagacggaacagtagagatcaagagtatttccagagaagcaggttctcgtacaaagatcgccgtatggtccaatgatccagatgttgatccagttggagcatgcgtcggaatgaacggtgcaagagtcaatgcgattgtcaacgaactgcgcggggagaagatcgatatcatcaactggagtgagaatccggcaatcttaattgagaatgcattaagcccggcaaaagttatttctgttatggcagatccggatgagaagacagcaagtgtgatcgttccagattaccagctttctcttgcaatcggaaaagaagggcagaacgcaagacttgcagcgcgtctgactggctataagattgacattaagagcgagacacaggccattgaggcaggagatattccggaaaactatatggatatggcgatggaagcagcagaagtggatgagccggagcagacagaggactatctggcagatgaagaatagaaacggagtgattgtttgggcagcgtaaagaagattcctatgcggaagtgcgtaggatgtggtgaaatgaaaagtaaaaaagagatgatgcgcgtactgaaaacgtcagaaaacgaattcattctggatgcgaccggcaagaaaaacggtcgcggggcatacctttgcttttcacgggaatgtctggaaaaggcagtgaaaaacagagggcttgagagatctttcaaacaatccattccggcagaggtatatgaacatttaaaagaggagatggatgcgattgaaacaaagtaaagcactttcgctgatcagtctggcgaccaaggcgggaaagacagtaagcggagagttttcaacagagaaagagacaaagtcaggaagagcagaacttgtcattgtggcagaggatgcttctgacaatacaaaaaagaagtttcagaacatgtgtgatttctatgaagtaccaatttatttttataaggataaagatacgttggggcatgcaatgggaaaagaattccgggcatcgcttgccgtgctggatgcaggatttgcaaagggaattaagaagcagataggggatgagaggcagacaatggcatagaggaggtagagcgtatgacaaaagtccgggtacatgaactggcaaaagagttaaacaagtcaaacaaagaaattttagattttttacaagagaagaaagtagaggtgaaaagccacatgagttcccttacagatgaacaggaaaacatggtgaaagatgcttttggaggaaagaaggaagcatcgtccgaggagacaccaaaaaagaaaaatatcgtgcaggtattccggccgcagaatacacagaatggaaagcgtcagggcggacaaagatcgaacaatggcggcaataatcagagaggaaacggtacaggacaaaaggatcgtcagaacagcaattaccgttccggaaatggcacaaacagccgtggaaacaacaataatcaaggatccagaaatggcgataacagaggagaacgttcaggaaaccgtccgtttaacagaggagagcgctccggggagaatcgtggtgagaacagaaactacaataaccgtggagacaatcgtccggatggaagaggagaacgccagggtcagaaaggcggattctccggtcagggaagaagagatgaccgcggacaggacaacagaagaaataacggaagaagagatgacagaagacaggagaatggaagaggaacttctccgtccattcctgcaccaattgttccggagcagaaaccacagcgccagaagggcaaagagaactataaaaagaaagattaccgggatgacgacagagaagaaagacttccaaaagggaagaaacaaaaaccgatgtcacagccggtaaaaccacagccaaagccagcggaaaaagaggaagaaaagatcaaaatgatcacaattccagagacacttactattcaggaacttgcagataagatgaagatccagccatcggtaattgtcaaaaaattattcatgcagggcaagatcgtgacagtgaaccaggaagtagactttgacactgccgaagagatcgcaatggaatttgaatgccttgtggaaaaagaagaagttgtcgatgtgatcgaggaattattaaaagaagacgaagaggatgaaagcacaatggtgaaacgtcctccggttgtatgtgtcatgggacatgtagaccatggaaagacttctcttctcgatgcgatccgtaacacaaatgtgatcgatcgtgaagcgggtggaattacacagcacatcggtgcatatgtggcaacgatcaatggagagaacattacattccttgatacaccgggacatgaagcatttacagcgatgcgtatgcgtggagcgagctcaacagatatcgcgatccttgttgttgcagcggatgacggtgtgatgccgcagacggtagaagcgatcaaccatgcgaaagcggcaggcatcgagatcatcgttgcagtaaataagattgataagccaagtgcaaatgtagagagagtcaaacaagaattgacagaatacggcttgatcgcagaagactggggcggaagcacaatctttgttccggtatctgcacatacacatgaaggaatcgatgaactgctggagatgattcttctgacagcagaagtatctgagctgaaggctaatccgaatcgccgtgcaagaggaattgtcatcgaagcgcagcttgacaaaggaaaaggttctgtggcaacagttcttgtgcagaaaggaacacttcatgtaggagatccgatcgcagcaggctctgcatacgggaaagtaagagcgatgatggatgacaaaggaagacgtgtcaaagaagcaggaccgtctatgccggtggagatcctcggattaaatgatgttccaaatgctggtgagatctttgttggatgtgagtctgataaagaagcaagaagctttgcagagacatttatctctcagaaccgtgtgagaatgcttgaagagacaaaatcaagaatgtccttagacgatctgttcagccagatccaggcaggaaacttaaaagaacttggaatcattgtaaaagccgatgtacagggatctgtggaggcggtaaaacagagtcttctgaagctgtctaacgaggaagttgtcattaagatcatccacggcggtgtcggtgcgatcaatgaatctgatgtcaatcttgcatccgcatccaatgcgatcatcatcggatttaatgtccgtccggatgcgactgcaaaagaaatcgctgagcgcgaaggtgttgatcttcgtctgtaccgtgtcatttacgatgcgatcgaagatgtgcaggcagcgatgaagggaatgctggatccggtatttgaggagaaagtgctcggacatgcggaagtacgccagacattcaaggcatctggtgttggaacaatcgcaggttcctatgtgcttgatggtacatttgagagaggatgttctgtcagagtatcgagagatggtgttgtgatcttcgagggtgctcttgcttcgctgaaacgtttcaaagatgatgtcaaggaagttagagccggatatgaatgtggtcttgtatttgagaagtttaacgatgtcaaagaagaagaccaggttgaagcattcaagatggtagaagtgccaagataggcaaaaaataagatagagaagttgaggaaactgcattttcagactaaggaggttgatcaatgtccgagagatatagtctggaaatcgcagtttccggcacatctaagcatggaaaggagaacaacgatgagaaagaacagtattaagaatacaagagtcaacatggaagtacagagagaattaagcagtatccttcgtgacgggatcaaagatcctagagtggcaccgatgacatcggttgttgctgtggaagtagcaccggatctgaagacatgtaaagcttatatcagcgttcttggggatgagaaggcacagcaggatactgttacaggacttcagagcgcagaaggatacatccgcagagagttggcgcatcgtctcaatatgagaaatacgccggaagtcaaatttgttctggatcagtccattgaatatggcgtgagcatgtctaagaaaatcgacgaagtgacaaaggatatcaaatagaggaagcgaaaatatggaattagaaagattattgcagggagcccaccgtgtggcgctaggcggacatgtccgcccggatggggactgtgtcggttctacactcggattgtatcagtatcttcagaaaaattacccggagatcacggtggatgtttacttggagccggtgccggattcttttcggtttatcggtgcggcagcaggtatccgttcggaagtcacagagacagaaacctatgatcttttcattcttttggactgcggcgattcggatcgtcttggattttccaaaatgctctatgagcaggcagggcggacagcgtgcatcgaccaccacatcagcaatcaggcattcgctgatgaaaatgagatcgacccggatgcaagttctacttcggagttggtgtatcgtctgttagacaaagaaaagattacaaaggagatcgcagaatgtctgtaccttgggattgtgcatgacactggggtatttcagtattcctgcactgcgccggagacgatggaggcggcagccgaactgatgcggaaaggcattgactactccggaatcattgaccgtactttttatcagaaatcttatgtacagaatcaagtgcttggaaaggcactgctggacagcaaactgcttcttgatgggaaatgtatcgcatcctttttgacaaaagaagagatggatgtttatggagtaaaaccaaaagaattggatgggatcgtcagtcagcttcgcgtgacgaaaggggttgaagtggcgatttttctctatgaattatctcatcatgagtttaaagtcagtctgcgggcaacgggtgaagtggatgtcagccggatcgcacagcaatttggcggtggtggtcataagaaagcggcaggtgttaccatgaaaggaagcgcagaagaaattctttcccggttggtagaagaaatccaaaaacagctctagaaacagacaaaagaaaatggagaaaagaaaggcagaagacagatgatacacggagtgatcaatgtatataaagaaaaagggtttacttctcacgacgtcgtggcaaagctcagagggattttaggtcagaaaaagatcggtcataccgggacactcgatccggatgcgacaggagttctgccggtatgccttgggaaagggacaaaactctgtgatctgttgacggataaggataagacataccgggcggtgatgctgcttgggactgtcacagatacacaggatagttccggagaagtgctggagaaaaaagataccgcatcgcttacagtcgaagaggtaactgcatgtattcagaagtttgtcgggaattatgagcaggttccgccgatgtattccgcattgaaagtcgggggaaagaagctttatgaactggcaagggaaggaaagacagttgagcggaaggcgagaccggtccagatccacagcattgagatcatggagatcgatctgcctcgagtgacgatggaagtatcttgctcaaaggggacttacatccgcacactttgtcatgacattggggaaaaacttggatgtggggcttgtatggaatcactgcttcggacaaaagtaagtcgttttgagttggaagatagcctgacgttaggtgagattgaaaagaagaagcaggacgggactctgatggaggcaatcattcccatcgatgccatgtttccagaatgcaggagtgtggatgtgaaagaggctggaaaccagtatctgtacaacggcaatccattttccctttcttttgtaaagaaaagagagaagtatgagccggaagaacgggtgcgggtgtacgatgcgcagggagtgtttgtcggaatttatcgctaccgtcaggaggaaaagatgttccggctcgagaagatgttctacgaaaagtaaaatctcacaatacggataaggatagaagaggaaatgacatgcagtatgtaagagaactagaatgctatcaggaacagagaaaagctgcagtgacactggggaaatttgacggcctgcacagaggccatcagaaactggtcagccgtgtgaaggcacatgcatccaaagaagtggtaagtgttgtctttgcatttgacatggctccgctctatgaacgactgggcaaacagaagaaaagtctgatgaccgggaaagaacggtatgagcatctcgatggacagacagattatctgattgactgtccatttacggaggagatatccggcatggaagcagagacgttcatcaaagaagtgctggtggatcagttccatgcagcgtatattgcggtcgggacagattttcattttggacatgagaaacgcggagacattcatatgctgaagcagtatgcagggatatatggatacgagttggaagtcgtggacaaagaactgtatcagggcagggaaatcagcagtacttatatcaaagaagaagtccgcgccggacatatggaagtggcaagagaattgcttggatatccgtatgcaatgagtggtgtggtggagcatggcagaaagcttgggagaaagcttgggattccgacgatgaatatcactccggatatcggaaagctggcgccgccaaacggcgtctatgcgtgccgtgtgcggattgatgggaactattatcaagggattgggaaccttggcaataagccgactgtggatgcggatggaaaattgattttagaagtcaatgttttttcgttcgacagagaaacctacggacagaccatccaagtagaactgctctcgtttgtgcggccggagcgcaagtttgcctctgtggaggagctgaaaagccagatggaagcagatattgcagcgattaaacgcagggaactgtgaattgtgcatagtgacgaaaactgagaaaagaaaagaaaattgaaaataaatcttgaaaaacaaattcaattatgctaatctaactaaggatttacgagccgatatccggtaactggaagactccaaccgttacttaatatctggcgctcaaatattaataataagaaagaataaaggaggatcatcacatgatcgcaaaagaaaagaaacaggctattattgcagaatacggaagaacagaaggagatacaggttcaccggaagttcagatcgcaatcttaacagcaagaatcaatgaattaacagatcactttaaagcaaatccaaaggatcatcattcaagaagaggtcttcttaaaatggtaggtcagagaagaggcttacttgcttacttaaagaaaactgatattgaaagataccgttctttaattgaacgtttaggacttagaaaataatcaaagtgattttagcaggggatggttattcgtgccatcccttgttttcagttacaagtgccggatgaaaaacattcggtgcagaagtttatgaaaaacggcaggaaagtatgagccgagaccactgaaaagcatatttccgcaggaactgtcagcagtgttgacagcgtccaaagcagaaatgtatttttcagtagtttcggtacagcctgccggcgaagaaaaggagaacagtatgtttaaaaaatttgaaatggaattagccggaagaactctgcgtgtcgatgtaggcagagtggcagcacaggccaatggtgcggctttgatgcactatggagagacggttgtattatcgacagcgacagcatctgaaaaaccgagagagggcatcgatttcttcccgctctccgttgagtatgaagagaaattatatgcagtaggaaagatcccgggagggtttaacaagagagaagggaaagcgtctgaaaatgcgatcttaacatctcgtgtcattgacagaccgatgagacctctgtttccaaaggattacagaaacgatgtgacattaaataacctcgtattgtctgtggatccggactgcagcccggaactgacagcaatgttaggttctgcgatcgccacagcaatctctgacatcccgtttgatgggcctacttctactacacaggtaggactgatcgacggagagtttgtattcaatccgaatgcggcacagagagcggtttctgatctgcagttgacagttgcttccacaagagataaggtcattatgatcgaggcaggtgcaaatgaagtgccggaggcgaagatgatcgaggcgatctttgcggcgcatgaagtgaaccaggaagtgatcaagttcatcgatacgatcgtggcagagtgtggaaaagaaaagcatgcatacacaagctgtgcagtgccggaagaattgtttgaggcgatcaaagagatcgtgacaccggaagagatggaagaagcggtattcacagatgaaaaacaagtcagagaagaaaatatccgcgtgatccgtgaaaagttagaagaagcatttgcagagaacgaagagtggctggaactcttaggagaagcattatatcagtatcagaagaagactgtccgcaagatgatcttaaaagatcacaagcgtccggatggaagagcgattgatcagatcagaccgcttgcagcagagactgatttgattccgagagtacacggttccgcaatgtttacaagaggtcagacacagatctgtactattacaacacttgcaccgctctcagaggcgcagagaattgacggtcttgatgaggcagagacttccaagagatatatgcaccactataacttcccgtcatactctgtcggtgagacaaagccgtcaagaggaccgggacgtcgtgagatcggacatggtgcgcttgcagagagagcgctcgtaccggtacttccaagcgaggcagagttcccgtatgcgatccgtacagtatcagagacatttgaatcaaatggttctacttcccaggcaagtgtatgtgcatccagcatgtcgctgatggcagcaggtgttccgatcaaatcagcagtggcaggaatttccgcaggccttgtgacaggggagacagacgatgactatatcgttctgacagatattcagggactcgaagacttctttggagatatggactttaaggttgccggaacacataaaggtatcacagcaatccagatggatattaagattcacggattgacaagaccgatcatcgaggaagcaattgcatgcacaaagaaagcaagaacttatattttagatgaagtaatgagcaaggcgattgcagagccgcgtgcttctgttggaccgtacgctccgaagatccgtcagatgcagattgatcctgcaaagattggtgatgttgtcggacagcgcggaaagacgatcaatgcgatcattgaacagactggtgtgaagattgatattacagatgacggtgcagtgtctgtatgcggtgtagatgcagaggcgatggaagaagcgatgaagatgattgcgatcattgtcacagactttgaagccggacaggtgctggaaggaaaagtcgtaagcatcaaagaatttggagcatttgtagaatttgctccgggtaaagaaggaatggtacacatttccaagatttccaaagagcgcatcaaaaatgtagaagatgttctgacacttggcgataaagtcaaagtagtctgcttaggaaaagataagatgggaagaatgagcttctccatcaaagatgtagcagaataagaagttgaattttataaatatacgaaaaagactccgtacagagaaatctgtgcagagtcttttttgcatagaaaagttcttcggattcttatcgaaatacattccgtgtgagaatctggttctaaacagacaagtttctcatatactgttttaagaggtggacaaagatgaacagagcaatcggaaaaaacagtcaggtgctgcagattcttgcaagagagattcaggaactgatcagccaggaagagatagacatggaaggacttcaggagatccgtcttcgtgtaggaagtccggtaatcttaaatatccgtggaaaagagaggattccaaagcggaatggaaaaccgcatcttgtcacgaagacagaaatgcgcgagacggtagattatatcagcagctattctttatatgcttttgaagaggagctgcgacagggatttctgacagtggaaggaggacatcgggtaggaatggcaggaaaagtgattatggatcagggaacgataaagaatatccagtatatttcatccgtcaacatccgggtggcacatgaggtaaaggactgtgcagggaaagtattgccgtatcttacatacgatcaacagctgtaccacacgctgatcatttcccctccgggatgtgggaagacaacattgctgcgggatttgatccgtcagatttcagacggaaatcgatggattcagggggaaagtgtaggcgtggtcgatgaacgctcagaactgggggcgtgtcatcttgggattgcacagaatgagcttgggatccgcacggatattttagatggatgtcccaaggcagagggaatgctcatgttgattcggtcgatggctcccaaaatacttgcagtcgatgagatcggggcgccggaggatattcatgcgatggagtacgcaatgcattgcggatgccgtatgctggcaactgttcatggcacatcgatggcagaggtgcaaaagaaacctgtgctgcagcagctgattcagaaaaagaggtttggtcgttacgttgttttgaaaaatgggattcatatcggagaggtagaaggaatttatgatgaaagaggaacactgctttaccgagaacaatacgagaagggggcatgcatgtgaaaggaatcggaattatcttgatcgttcttgggacgagtggaatcgggtatctgacggcggctgatctcaaacgacatctgaacgatctgaaatgtctgcggaggatccttttgttgttaaaagaagaaattgcatacacgcacgcaccgcttgaggaagcatttgcccgcatttcaagaaaagtaaaggcaccgtactgcttgtttttgacacaggtatccggacagcttgcaagacgtgcgggaagttcctttgccgaaatatggtcttgtgcggtggaagagcgactttgtacaacaaagcttacgagggaagagttagaagaattaaaagaatttggaaatagtatcgggtatctcggcggacatgcccaggaaggggcgatcgatctgtatctggaacaactgaaggtggaagtacaagacgtgcgggaaggactggctgcgaagcagaaactatgcagctgtctcggtgtgatgagtgggatttttattacaattttattgatctagtgggaggagtacatgagtgttcagcttatttttaagattgcggcagtcgggatcctcgtctcggtactatgtcaggtattaaaacacagtggccgggaggaacaggcatttctgacaagtcttgcagggcttctgctcgtactgttttggattcttccctatattcaggaactgtttcattccattgagcagctattttccttataagagatggagaagggggatacgagttgaatgcagtacagattggacttgtgggtgtggcgggcgcgctgcttgcgattcagtttaaaaatggaaaatctgagtatggcatctacctaagtgtggcggtcagcattttcatttttctgaatattgtagggagactggagattatccttgagacgcttcgtgcaattggagatatgatcacgattgaccgggcgtatatcggtacactgctaaagatggtgggaatcacttatgcagcggaattttcctctggaatctgcaaagatgccggctatcagacggtggcatcccagattgagattttcagtaaactgacgatattggcgcttggcatgccgatcctgctggcgttgttggagacgatccatgcatttttaacgtagtgaaaatgggagttgggaggaggcacatgaaagagcagaaaccggtatgggacagaaaaaaagcatggtggacaagaattctgtttgcgctgctgttgctttttttgtcgacagcgcatgcagaggcatcggagatagaagaagagcaggcgcttaaggaggcaaaggaagctgtggaggaggctcttttcggagagtttggctttgaggaagtgacgggggcgctcgaaagcatgttcccggaagggaagatggatttttccaagatggtgaaagaggttgaaaaaggagatcttccgatgtcgtttgaggcagtcggacagtttgtgaaagatcaggttgcctatgagtttgggcagagcaaaaagagtcttgtgtatatattgatgcttgcagtgattgcggctgtatttgccaatttttccggtatatttccaaaccgccagatttcagagattagtttttatcttttgtatcttttattatttaacgtgtgcttaaatggttttcgtatgatgacagatcttacagcgcagagacttaccattttgacttcatttatgaaggtgcttggaccggtctactttctcgcagtagccgttgcaaatgggggtgtgacatcggcagcgttttataatctggttttatttttgatctttcttgtggagcttttgatcttgaatgtcctgcttccatttgtacaggtctataccatattggagttattgaatcatctttcttccgaagaatatttatcgaaaatggcagatctgatccacacgggaatcgattggagcattaagacacttcttgcatgtgtcgttggtctgaatcttgttcagggaatgctgcttccggtgatcgattctgtcaagagaggggtggtgacaaagactgcagaggcaattcccgggatcggagatgcaattggaggaatgacggaggttgttcttgggacaaccgttcttatcaagaacagtatcgggattaccggcgccatcatctgcgtaggaatctgtgcggttccgtttttgcaggtcgcagtggtcgcatttctctacaaactggtggcggcggtgatccagccggtatcggatcagcggattgtcggctgcatttctggaatcggcaaagggtatcagcttctgctgaggataatctttacgacgggattactgtttctactgacgatcgtgatcgtcacagcatcgacaacttaatgcatttgaaggagaaaaagatgacagagggactgtatcaatgggtggaaaatattgcgttttatatggtgcttatgacagcggcacttcatttgatccccggtgatggatacaggaagtatctgaagttttttacaggacttttattgatcttgcttgtgatcagtccgctgctaaaggttgccggaatggaaaaaacttttgaagaagtgtttcagaagcatacttatgaggaggaattgcgaaagatcgaggagcagacaaagtaccttaaggaaatctgcccggaagattatcttccaaaagactatggcggcaacaatccacaacaagacagaatgaaggaagaagaaatcgctgaggaaagagaaaaagaaggaggggaagagtacagtgaatagggaacggtgggactggaaatttccagaaggatttcctaagaaacatcaactgctggtcgtgcttcttgtcgggatccttcttgtgatcattgcaattccgactccgaaaccgggtgaaagcttggaaaaagaaagaacgagtgaggcagatgatagaaagacgacggatttggatacgtatcgggaaacgatggagcgggaattggaagatatcttaaaacggaccgagggtgtgggaagggtgcgggtgatgattacgtttcgcacatcggcagagaaagtcgtggagaaagatttggagaaaagcgagtctgcaagacgggaggaaacagtgtttgaagatactgcgcaaggagcacatacaccgtatgtgcgaaaggaagtacaccctcaggtggaaggagtgcttgtaagtgcagccggaggggatgatgctgtcgtgcgaaaggaaatcacggaggcagtgcaggcattatttggtattgaaacgcataaaattaaaataatgaagcagagtgattcaaagaaggagggttcattttgaaaaaactatttaagaagaatcaggtaatcattacaacactggcagttatgatcgcggtggcgggatacttgaactattccggaaagctgtttggaggagcagaagggaaggagacgagcggagaactggcgaacaaagaactgcttgatatctccgagcagga

SEQ ID NO: 36 - DNA, 2897466 bp, Faecalimonas umbilicata (residues 1,448,734-2,897,466 of 2,897,466)
  source 1..2897466: mol_type = genomic DNA
gctggctgagacggcaggagatattgagagtacagacaaggaggcagcgctggaggattcggtagatggaacaccgggggaggcagtacttacaagcggagaggcgaataaagtagtggcagaggcaaaggtttccagagaacaagtgcgcgcaaagaataaggagacgcttcaggcgatcattgataatgcggagatcggtgaagaacagaagcagcaggcagtcaatgagatgatccagctgacggatctgtctgagaaggaagtggcagtggagacacttcttgcatcgaagggattttcagagacggtcgtcaatctgacggtggacagtgcagatgtggttgtaagcaacgcagatctgacagatgctaatcgtgcacagattgaagatatcgtcacaagaaaaacagggattgccccgcagaatatcgtgatcacaccgatacatagtggggaagaagaggcaaaggcagaagaaaaatagtttttgttgataaacaaaaaaagagttgctataatagaaacgttgaaaaaaagcaaagcaggagaacattatgtcaaatattacgaatgaaataaagaaacgaagaacatttgcgattatttctcatcccgatgccggtaagacgacattgaccgagaaatttttattatacggcggcgcgatcaatcaggcaggatctgtcaaagggaaggcgaccgcaaaacatgcagtatcagactggatggagattgagaaagagagaggaatctcagtgacttcctccgtgcttcagttcaactacgatggatattgcattaacattctggatacaccgggacatcaggacttctcggaggatacttatcgtacactgatggctgcggattctgcggtgatggtgatcgatgcatccaaaggtgtggaggcgcagacgagaaagctatttaaagtctgtgtaatgcgtcatatcccaatctttacctttatcaataagatggatcgtgaggcgagagatacgtttgaattgctggacgatatcgagaaagaactggggattgcaacctgtccggtcaactggccaatcggttccggaaaggcatttaaaggtgtctatgacagagaacatcgggaaattgaactgttctcagatacacaaaaaggaacaaaaatgggagaagtgaagaaaatttcattggatgatccggagctgagtacactgatcgaggaagatgcactttctcttttggaggaagaagtggaactgttagacggagcaagtgctgagtttgaccaggagctggtaagcaagggagaactttctccggtatttttcggctctgcgctcacgaactttggtgtggagacatttttacagcatttcctttctatgacttcttcgccgcttccgagaaagtcagataaaggagagattgacccgatgactgagaaggatttctctgcatttgtcttcaagatccaggcaaatatgaacaaggcgcatcgtgaccgtattgcgttcatgcggatctgttccggtgagtttgaggcgggcatggaagtatatcacatgcagggaggaagaaaggtgcgtctttctcagccgcagcagatgatggcaagtgagcggaagatggtagagaaggcttacggaggagatatcatcggtgtgtttgatccgggaatcttctcgatcggggatactcttacgacttcagcagagcggttctgctatgagggaattccgacttttgcaccggaacattttgccagagtacgtcaggtggatacgatgaagcgtaagcagtttatcaaaggaattaatcagattgctcaggaaggtgcgatccagatttttcaggagtacaacaccgggatggaagaaattatcgtcggagttgtcggtgtgcttcagtttgacgtattaaaataccgtctggaaaatgaatacaatgtggagatccgcatggatcagcttccatatgagcacatccgctggattgagaatacagacattgatcttgataaagtaatcggaacttctgacatgaagaagatcaaggacttaaaggatcgtccgcttcttctgtttgtcaatagctggagcatccgtatgacactggatcgaaacgagggactcgttctgtctgaatttggtcgttcttaaagttttttgtttgcaaataatgagaaatttgttataataactataacagacagcaaaccagacaggaggttttagaaatggtaaaagacgaaagaaatacgtatacgatacatcaggatccgaatctcggggaagtaaagatcgccgatgaagtagttgcgatcattgcagctctggcagccacagaggtagaaggggttgcttccatggcaggaaatatcacaaatgacctgatcgcacgactgggaatgaagaatttatccagaggcgtgaaggtggatgtgctggaaggaatcgtgacagtatctctggcacttgtcttgaaatatggctataacatcatggatgtgtcagcaaagattcaggagaaagtcaaagcggcggtggagaatatgaccgggcttaccgttgcggatgtcaatatccgtattgcgggtgtagacatgggtgaagaatagatttgaaaaaatcatggctcacagggagattatgaaaggtttttcataatctcttttcgtgtgctgaattctattttgcaatatggaaggttatgtagtataatagagcctatcgaagagataacctttgaaaaaacagacagtgaggtatacaatgggaagatcagaacttagagaacacatttttagaatattattccgcatcgagtttcaaccgaaggaagagatggaagagcagcttgcactttatctggaagagctggaatcggcaaaggacacagagaaagaatacattcgcacaaaatatgccgcaattgcggagaaggtggagatgatcgatgagaagatcaatgcttccgtgacaggatggaagacatcccgaatgggaaaagtagacctgactattcttcgtcttgcagtttatgagattgagtgggatgaggaagtgccgcagggggttgcaatcaacgaggcagtagaactggcgaagagatatggtggtgaagagagtccgtctttcatcaacggagttcttggaaagatcgtcaattcgaggtagtgccatgcgcagtgtatattccgtcggtcaagtcaattcttacattaaaaatatgtttacacaagatttcatgcttgggcgcatctatgtgaaaggagaagtgtcaaactgcaaatatcacacttccggacatatttatttttcactcaaggatgagacagggacgatcgcctgcgtgatgtttgccggacagagaggcggtcttgcttttcggatgagagaagggcagcaagtcatcgttcttggaagtgtcaatgtctatgagcgcgacggcagatatcaactctatgcgaaagagatcatcttagatggggctggattgctatatgagaagtttgagaagctgaagcaggaattggaagagatggggatgtttgagcaggaatataagcgaccgattcctccatttgccagcacggttgggattgtaacagcgcctacgggggcggcaatccgggatatcattcatattgcgtccaggaggaatccttatgtgcagctgtatttgtgccctgcacttgtacagggagaagatgctgcagaaagcattgcagacgggatacgaagactggatgcattcggcgtagatgtaatcattgtaggaagaggcggcggttcgatcgaggatctttgggcatttaacgaggagattgttgcccgggcgatctttgcatgtcagaccccggtcatttcggcggtgggacatgagaccgacacaacaatcgctgactatgtagcagatcttcgtgcgccgacaccttctgcggcagcggagcttgcggtttatgaatacgatgttgtccgcgtatatttggatgagacggaacggaagctaaaacgtgcactttcgcacgtggtggaagagatgcgaaatcaggttatgcagcgggcgcagaggctttcttatctgcatccgcaggtgaagctaaatgagaaacggcaacaggcagtggatttggaagaacggtttaggcagaagatgcaggagcggttaaaggaagcaaagcacggtctgtctgtgcgagcagagcgtctcaacggactttctccggtcagaaaattgggacagggattttcttatgtacagaatgagattggagtcaatattcgaaaaatcgaagatgtctgcccaggcgaactcctttccattaaagtgacagacggaacgatacacgcacaggtgacggaagtggaaaaggaggcggaagatggcggaaagcacagtcaaagagaatagaacactggaggaactgtttcaggaactggatggaatgatgcggcagatggaagagccgggactttctttggaacagtctttttcactttatcacagaggaatagaactcttgaagtcatgcaatgacaagatcgatacagtggaaaaacagatacagatattagaagaaaatggagaataccatgaattttagagacgagaaaagaaagaaaacagaggagatcgaacagatcctaaaggcgtatcttcctgtgcaggaaggaaagcagcaggtcatcatggaggcgatggaatacagtctgatggcaggagggaaaagactccgtccgatgcttctttgggagaccttccagatgtttggaagtgccgcaaagaccgtcagaccgttcatggcggcaatcgagatgatccatacctattcgctcgtacacgatgaccttccggcgatggatgatgatgattaccggagaggaaggaagacgacacacatcgtatacggggaagacatggggatccttgccggagatgcattgttaaattatgcgtttgagacagcatgcactgcatttgaggaagcgccggaggaggcaacccggatcgggaaagcacttcaggtgcttgcaaagaaagcaggtatctatgggatgatcggagggcaggtcgtagatgtcagtgcttctggaaagaatatcacagaagatatactttcttttatttatgagctgaagacaggagcgcttttagaaagtgccatgatgatcggtgcgattctggctggagcagaagaagaggaagttgcagtgatcgagcaggtcgcgaagaagattgggatcgcatttcagattcaggatgacattcttgatgttacaagtacagaagaagtgctcggcaaaccagttttcagcgatcagaagaatgagaagacgacttatgtgacgctcttcggattagagaaagcaaaaaaggatgtagaacagatttctgaggaggcgattgctctgttaaggagtctgcagagggagaatgcctatctggagcagctcttgcaggagttgatacatcgggagaaatagagggagtgcctatggtactggaaaaaattcagaaagcaaatgatataaaaaaattaaagccggaggagcttgaagtgcttgcccaggagatccgggattttctgatcgagaaaatcagtgtgaccggcggacatctggcttctaatcttggcgtagtagaactgacgatggcgatgcacctgatttttgacctaccggaggataagattatctgggatgtggggcatcaggcgtatacgcacaaactgcttaccggcagaaaagccgggtttgatgatctgcggaaatatggtgggatgagcgggtttccaaagcggaaagaaagcgattgcgatgcgtttgataccgggcacagttccacatccatctcggcaggacttgggtatgtagaggcacgggagatcctaggacaagatcataaagtcatctctgtcatcggggatggcgccatgaccggcgggatggcatatgaagcactcaacaatgcagcaggattaaagagtaattttattattgtgctcaatgacaacaatatgtctatctcagaaaatgtaggaggcatgtcgaagtatttggatggtcttcgaacagcgagtgcctacaccggattgaaaaagggtgtggaggcggcattagggaagctgccgtatattggagcgagagtgacaggacatattcggaaagcgaagagcggaatcaagcagctgtttgttccgggaatgttttttgaagatatggggatcacctatcttggcccggtggacgggcacgatcttaaggcattgtgtcgggcttttaaagaagcagagaaacttcagaatgccgtattggtacatgtgattacaacaaaaggaaaaggatatctcccggcggagaaatatccgtcccagtttcatgggacaggtccgtttgatattgagaccggacaggcaaaggaaaaagcaggggaagattcttacaccgatgtcttttccaaagtgatctaccgagaggcgaagaaggagccaaagctggtggcgattaccgcagcgatggcaggcgggacaggattggttccattttccaaaacctaccgggatcgattttttgatgtgggaattgcagaagagcacgcagtgacatttgcggcgggacttgcagcggcagggcttaagccggtggttgcaatctattcctcttttttacagcgggcgtatgaccagctgatccatgacgtctgcctgcagaatctcccggttgtatttgcaatcgaccgcgcagggcttgtggggagtgatggagagacgcaccagggtgtgtttgacttatcatttttatcgacaatcccaaatatgacggtgatggcgccgaaaaacaagtgggaacttgcggatatgctccgttttgcaatccagtatccggggccggtcgcggtccgttatccaagaggaacagcgtatacaggactggaagagttccgcgtgccgatcgaatatggaaagagtgaagtgatccaagctggagaaggaatagttcttctcagtgtcggacatatgatggagacggccttgcaggtgagtgattccttaagagagagaggaattcaaagcacactggtcaacagtcgatttgtcaagccggtggatgaaaaacttttggaggaactttctaagtcacatacactttacgtgacgattgaggaaaatgtactggccggagggtatggagctcaggtgcttgcctatgtggagaagaaaagacttcccgttcaggtagagtccttcggaattccagatgagtatgtggaacatggaaatatagaagtattaagaaaagaagtaatgctggatgcggatacgatcacagagcggatcctgtccgtgtaccagaaaagacagcaggagtagaaatagatgaaagagcgtttagatgtattacttgtaaagcggaatcttgcagagtcaagagagaaggcgaaggcgatcatcatgtccggcaatgtatttgtggaaggacagcgggaggataaggcgggaaccactttttcagatgaggttcagattgagatcaaggggcacacaatgccgtatgtcagccgcggcggattaaagcttgagaaagcaatcgccaattttgatgtagatctggaaggaaaagtctgcacggatgttggttcttctacagggggatttacagattgtatgctccagaatggtgcgagaaaggtgttcgcgatcgatgtagggagaggacagcttgcgtggaaactcagacaagatgaccgggttgtatgtatggagaagacaaatatccggtatgtgacaccggaagatcttggagaggaaattgatttttcttccattgatgtgtcttttatctcgctgacaaaagtgctggaaccgatccgcaactatttaaaaccggatggggagattgttgccctgatcaagccacagtttgaggccggaagagagaaagtagggaagaagggagttgtccgcgagaaaagtactcaccacgaggtgatcaaactggtcacgtcctatgcggcatcaatcggatttcagattctcggcattgaattttcgccgatcaaaggaccggagggaaatattgaatatctggtacatttaaagaaaagcgaagcgggaagcaatctgccggatatggaaggtgcactatatcaggtagtggaggcagcgtttgaggcgctggcaaaataaaagcgagagaggtacgttatggaaacgttttacatcattacgaattacagtaaagatgaaaattatgaggtgacaaggcagatacaagattatatagaaaagcgcggcagaacttgtatcttatgtgagcgagatgaagagggcaatctccttacggaccagattccaaaagagacagactgtgttctgacgctgggaggagacggaacgttgatccaggcggtcagagaattgaggaacaagcatcttccgttgatcggagtgaatatggggacactcggatatttgacagagattgaacttccaaaaatcgaagaaagtctggaaaagctgttttgcggggcgtttcttccggaacgccggatgatgttgcaaggaaagcttgaaggaagaaaggaagatatcgcgctcaacgatattgttgtggcgcgtgccggaagtatccgtgtgatccatttcaatatttatgtcaatggacagcttttaaattcttaccaggcagatggagtgatcatctcgacgccgacaggctctaccgcgtacaacctgtcagcgggcggaccgatcgtggaaccgacggcagagatgtttgtaatcacaccgatctgttcacacgctttaaatacaagcagtatcgtactttcggcggaagacgagatcgtgatcgagatcggaaaaggaaaaggagatacggttgaggaggcgagcgtgacgtttgacggagcggatgtgattccggtctatacaggggatcgtattacgatcagccgttctgaaaagactgccaaacttttaaagctgagtgaggagagttttctggagacgctgcgcaagaaaatgaaaggaaattaaataagatgaaagtaagtcggcatgcaaagattgtagaattaatcaaccagtataatatcgagacccaggaagagctggcagaacagctgaacaaagcagggtttcaagtgacgcaggcgactgtttcaagagatatccgtgatctgcggcttacgaaagttgcgggggaaaatggaaaacagaagtatgtgatccttcaggttccggaaaaggatatgaaggaaaaatacatgcggatcctaaaagacgggtatgtttcgatggagatggcacaaaatatactggtagtcaaaaccgtatccggaatggcgatggcggtcgccgcatccattgattcgatgcagtggtacgaagtcgtcggctgtattgcgggagatgatacgatcatgtgtgcagtccgcagcacagaagagacgaaaattgtgatggaaaaaataagaaaaattgtattgtaacggcaggagaaacagatgttacaaaatttacatgtaaagaatctggcgctgatcgatgagatcgaagtagaatttaaaaaaggatttaacattctgacaggtgagaccggtgccggaaaatcaattattttaggctctatcggactggcgcttggcgggaagtattctgctgagatgctgcgaaaaggagctgcttacggattagtagaactggtatttactgtggaacatccgtcccaggaggcacagctgagagcacttgatatttatccggaagagggacaattgatcttaagcagaaaactgatggatggacgaagtgtcagcaagatcaatggggaaacggtaacaacacggattctaaaagatgtggcgacgattctgatcgacattcatggacagcatgagcatcagacattgatccaccggaagaatcatcttgcttttttagacttgtttgcaagagaagagatcggagatctgaaagataaggtcaaagaggcatggaacagctgcaaggtgaacgaaaaagaacttgcacttgcgatcaaagatgaggacagcaggaggagagaggaagattttctttcttttgagcttgaggagattacaaaggcagagttaaaacctggtgaagatgatttgttggaggaacagtataagcggatgctgaccgggagacggatggcggagcatatggaggaagcttatgcttatacaagtgacaatggcggaggaaatgctgcagactgcattagtcgggcagttcgtatttttcaggaaatttccggctgtgatccactggcagaaagtttgtatgagcagttgtcagagatagagaatctgttaaatgattttaaccatgaactttctgcggcgagaaactctgtagaattttccccggaagaattccaggaggtggagatcaggctcaacgagatcaatcgtttgaaatccaagtatggaaattctgtggaagagatcgaaaaatacgccggtcaggtggaggaaaagctggaaaagcttcatgactatgaaaattatattgcatccctccaaaaaaaatatgaggaatcctgtagaaaactggaagttcttgcggaagaactgtcggagattcgacaaaaacaggcacagatctttgtggagaggatccggctcggcctgaaagatttaaatttcctcgatgtgcagtttgaaatgaagtttaccagacttttggaatgcagggaagatgggatcgatgagccagaatttcttgtatcgatgaatcctggagagccgctgcggccactgggcatggtggcatctggaggagaattgtcgaggatcatgcttgtgatcaaaacagttctcgcatatcgagaagagattgctacattgatctttgacgagattgacactggaatcagtgggattactgcgggaaaagttgcagagaagatgggaatgcttgcaaaagagtatcaggtcatttgtattacgcaccttgcacagattgcagcgatggcagatgcccattatgtgatcgagaagacggtgcaggatggggtgacaaagactgcgatcaatgagttgacggaggaagagtctgtggcagaactttccagattgctcggaggatctgcagtgacagagtcgatccggcaaagcgctgttgaattgaaaaaaatggcagaactttccaaaagaaaatcagagtgaatcagataaaattccatatactaaggcagacatgaaagtgtctgtcttatttttctctaaaggaaggttttggaatcttgcggaagaaaaaatatactgtgaggaatgtacagtcgtgcaatctttttatgttgggaggaatgaagtgtgagaaaatactggtatcggaggagtctgatgatccttcttctgttcacggtgctggtaggcggcggcgcctgcatcgtaaaatatcagacaatctcgcagaaaagagaagtgagtacggaggaaatcagcgaggaatatctgattcccgggggaatgccaatcgggatatatatggagacgaacggtgtgatggtgctgggaacagatgcgatcgaggggacagacggagataaatataaaccggcagatcatatcgttcgacagggagattatattacagggatcaatgatgaggtgatcacaaacaaaaaagaattgattgcggcagtaaaaaagcttgatgatgaaaatgttgtgcttcatcttcgcagaaaagaccagcccgtagatgtgcggctgaaggcagtggaaagcagtgaggaagaatatcgtctcggaatctgggtgcgggacaatgcccagggacttggcacagtgactttcttaaatggaaatagtcagtttggtgcacttgggcatggaatccacgatgtagataccaatgagcttttggaaatcgccaaaggaagtctctacgaaacaagtatcagtgcaatccagaaaggggaggatggaagtccaggcgggatggaaggtgtgatcgtgtacaaccgatataatattctcggggagatcacggaaaatacagatgcgggaatattcggtacggtagaccggatcaatgaattatttgcggatgagacaccgctgaaagcagggagaaagacagagatccaaagaggaccggcaaaaatcaggtgctgtgtagatggtgttgtcagagaatatgatgtcaatatattgaaagtggatctctcggagcgggaagtcaataaggggatcgtgttggaagtgacagataaagaacttcttgagaagacgggcgggattatccaggggatgagcggaagcccaatcatccagaatgacaagatcattggagcggtaactcatgtgtttgtgcaggatgcgaagaaaggctatggtatttttatcgaaaatatgttggaacatgtaaaatcctgacaggactgtcgaataatgaggaaccctttttcttgattcgccacctatggcaagtctataatgaatgctgtggaatgaaggcagaaattgaaggaggatgtagccatgggaaaactgaatgtagctattgctgacgataatgagagaatgttggatcttcttggggaactgatcgatcgggacaaggaactgacactggttggaaaagcgaacaatggggaggatatgtgcaaaattatagaacaaaaacagccggatgtcgtccttttggatctgatcatgccgaaaatggacggattgagtgtgatggaacagatcaatacagataaaaaaatcaaaaagcatccgagttttatcgttgtgacagctgtcggacaggaacaaatgacagaagatgcctttgaaaaaggagcgaattactatattatgaagccgtttaataaccggatgctgttagataagatcaaacatgtgaatcgagtttaccgcccggcagccccggaccgggaactggaaagcagcaggaaagatctgccggagtatgatcttgaggaggaagtaacggatatgattcacgagatcgggattcctgcacatatcaaaggatatcattatctgcgggatgcgatcataatggctgtggaagatatggatgtgctaaatgcaattacaaaaatcctctatccgactgttgcgaagaaaaatcagacaacatcaagccgggtagagcgggcgatccgccatgcgattgaggtggcatggacgagggggaaattggagacgatcgatgaaatgttcggatatacggtcagcagcggaaaggggaaaccgactaactcggaatttatcgcacttcttgcggatactatccgtctgagaggaagacgcaggcagcttgtggaataaaaaggactcagttctatcttatgtcttttcatttttctgaaaatacgatataataacagaaagtaaaaagtttggagggaatcatatgaaaaggattttgttcgcagcgtcagagtgtgtgccgtttatcaagaccgggggacttgcagatgttgtaggttcgctgccgaaatactttgataaagagaagtatgatgtcagagtcatgcttccgaaatatatgtgtatgaaagaagagtggaaagaaaaattagagtatcggactcatttttatatggacttgaactggagaacgcagtatgtcggtgtgttggaatatgtgcacgatggtgtgacattttattttattgacaatgaattttattttaatgggtttgccccttatggcaatatctatgaagacattgagaaatttgcctttttctccaaggcagttttaagtacgcttccggtgatcgatttccggccggatatcattcattgccatgactggcagaccgggttgatcccgatttatcttgataatttccggtattccaatgaatactatcggaacattaagacgatcatgacgatacataatctgaaattccagggaacgtgggatacaaagacggtgagggatatcacaggattgccggattactattttgttccggataagcttgaagcatacaaggatgccaactatctgaaaggcggaattgtctatgcagatcgcattacaacggtgagtaactcttatgcagaggagatcaagatgccgttttatggagaaaatcttgatgggctgatgcgtgcacgggcaaactgcctgcagggaatcgtgaacggaatagattatgatgtctataatccaaagacagatgaattgattacgaataacttctcggtggaaaatttccgcaaagagaaagcgaaaaataaactggcgcttcaggaagaacttggactggagaaaaacgcaaagaccatgatgatcggaatcgtatcaagactgacagaccagaaaggattggatctgattgcctatatgatggatgagttatgtcaggagaatatccagcttgtcgtacttggaaccggagaagaacgctatgagaatatgttccgccattttgcatggaagtatcagggaaaagtctcggcgaacatttattattcagaagcactgtcacataagatctatgcatcctgcgatgcgtttttaatgccatcactatttgaaccatgtggattaagtcagctgatgagtctgcgctacggaacacttccgatcgtgcgagagacgggaggactgaaagatacggtggttccgtacaatgaatttgacaagaccggaaccggattcagttttgcaaactacaatgcacatgagatgatggacatcatacgttatgcagaacatatttattatgataagaagagagattggaataagattgtagaacatgcaatgcagcaggatttttcctgggataattctgcaaagcagtatgagcagttgtacgatgatttgatctaaggcacacccaaaataacagcatgagaatattgcagctaaggagattacgagaagatgaagattatagataaattacaggagaacaaaatacatatttcatttgagatttttccaccaaagacggatgcaggaattgaggccgttttaagcgccacagagcagatcgcgaagcttgcacctgcgttcataagcgtcacttacggcgcaggaggcggaacgagcaagaatactgtacagattgcctcggatattcaaaagaaaatgggtgtgaccagcctggcgcatctgacctgtgcttcttcgacaaaagaggaagtgttgtcggtggtagaccgattaagggcggaggggattgaaaatatcctggcactgcgcggagatattccggaagggcgggaatttccggagacagaccagtatcattacgcatatgaactgatccgagagattaaaaagcagggcgatttttgcattggggcggcatgttatccagagggccatgtggaaaatgaacacaaagaagatgacatcgcttatctaaagcagaaggtagactgtggagtggattttcttacaacgcagatgttttttgacaatgcgattctctataacttcctctatcgtattcgggaaaaagggatcactgttccggtactcccgggaatcatgcctgtcacaaacagcagacagatgacgagaatctgcaaattatccggaacggttctgccgcagcggttccatgcgatcttagaccgtttcggggagaagccggaagcgatgaagcaggcgggaatcgcttatgcgacagaccagatcattgatctgatcgccaacggaattgatcacatccatatttactcaatgaataagccggaagtggcggcagcgattatgacaaatctgtcagagattttgaggtaatgccgatggaaatgcggataaaggaagcaatccgctatcttggctatggaagacatgcggtagatgatggaacatttgcactgatcacagaagtttttagagaacttgatcagataaaatgtgcgaagtcagtctatcgcatttttgatttgcaggtcaaaggagcggatcagatagaaattggcggatggacagtcacaagcaaaaacctctcaaaaaatcttacgggatgtgatcaaattgttttgtttggggcgacgcttgggacggaggtggacagatggatccggagatactctctgacagatatggcgaaggcggttgtcggtcaggcatgtgctgctgcggaattggaagagtattgtgatgactgtcaaaagaaaatcgcagaagagtatcagagacagggaaggtatctgcgcccgcggtttagtccgggatacggagatttctcaatttcctgtcaggagacactgatgcggatgttagactgtgcgaagacgatcggtcttaccctcacaggaggagggatgatgacaccgacaaaatctgtcaccgcagtgattggagccagcacagaacaacagccatgccatatcaaaggatgtgaggcgtgtgagaagaaggattgtttatacagaaggagtagttagaggatgctgttagaacgtttgggaaaagaattactgtttctcgatggaggaatgggcacattgttacaggagaaagggttacagccgggagaacttccagagagctggaacttaaaaagaccggaagaagtcattgcgatccaccagaattattttgaggcgggaagcgatattgtactgacaaatacttttggcgcgaatgcgttgaagtttcacagtgaagactgtcctttacaggaggttgtcaccagagctgtggaaaatgtgcgggaggcggcacggcgtggtgtcaaagatggcagagaaatctatgtgggtctggatatcggaccgaccggaaagttgttaaagccgatgggagatcttgcctttgaggatgcctatgaggcatttgcagaagtaatggaatatggtgagaaagccggagcagatctcattcatattgagacgatgagcgatacttatgaagtgaaggcagcagttctcgcggcgaaagagcgcacaagtcttcccgtatttgcaacgatgatctttgatgaacgcggaaagcttttgactgggggagacgttccttcggtggttgcgatgctggaaggacttcgtgtggatgccctcggaatcaactgtggtatgggaccggagcagatgctttcgattttggaggagcttttgacttacacgtcactgcctgtgatcgtaaagccaaatgcaggacttccgaaacagcgggacgggcagacttactacgatgtagtgccggaagaatttgcgtctacgatgaaactgattgtagagaagggcgcctgtattatcggggggtgttgcggaacaacaccggcacatatccgacagatgacaacactatgtcaggggatgagagcagttccgccggtaaagaagcatcatacactcgtatcttcttatggaacctgcataagttttggaagaaagcctgtcatcattggagaacgcatcaatccaactgggaaaaagaaattaaaacaggcattgaaagacggagattttgactatatcctgaaagaagggattatgcagcaggagaaaggcgcgcatattctagatgtcaatgtaggacttcccgacatcgatgaagtggcagtgatggaaaaagtggtgacagaacttcagagcgtcacaagccttccacttcagattgatacggtgcttccggaagcgatggaacgtgcgatgaggatttacaatggaaagccgatgatcaactctgtcaatgggaaacaggagtcgatggaccaggtgtttccactggtgcagaagtatggtggcgtcgttgttgcactgacgatcgatgaagacggcatcccggatacggcagaggggcgtcttgcaatcgcggaaaaaatcatctgtgaggcggaaaaatatgggatcgatcggaaagacattgttgttgatgtgcttgcgatgacgatcagttcggaaccggaaggagcgcttgtgacattgaaagcattaaaactcgtgcgggaagtatgcaaagtaaatacggtgcttggcgtatccaatatatcttttggacttccgaaacgtcctgtgatcaatgcgcatttttatacgatggcgatgcagcaagggcttacatcggcaatcatcaatccgttctcagaggagatgatgaattcttattatgcgttttgtgcgctgatgaactatgatgagaactgtgcttcctatatcgagcggtacagcaaaactgtcgaggaggaacaacagtctatagcgggcagtccgacgcaggccgggcaggagacgtcccaggcgggagaaatgtcactgcagacagcgatcgaacgtggattaaaggaagaggcgggacatcttacgagagagctcgtcagagaaaaagagccgcttgcgatcatccaggaacagttgatcccggcgctggatattgttggaaaaggatttgagaagggaacgatctttcttccgcagcttctgatgagtgcagaggcagcgaaagaagcatttgccgtgctgaaagaagtgctggaacgaagcggacaaaaagagcagaagaaaggaaaagtaatccttgccacagtcaaaggagatatccatgatatcgggaaaaatatcgtgaaagtcctgctggaaaattatagttttgatgtgatcgatcttggaaaggatgtggatccggaggtgattgtgcatactgcaaaacaagagggaatcagactggtcggactgagcgcgctgatgactacgactgttgtgagcatggaagagacgatccgattgcttcgggaacactgtccggactgcaaagtgatggtcggaggtgctgttttaaatccagaatatgcagagatgatcggggctgatttctatggaaaagatgccatgcagtctgtctattatgcgcagcgtgtatttgcataaggacctctcatataagatagcaatctacttccaaatatggaagtgggagggtggaaacgagttacattgtatctgaaagaatgcatccgagaacattgacaaacgattaacactcttttatgattaaatgtagtaatgtatcggagccgatgtccgatggaaaagcagcttgtgacattgtaaaaatgtcatggatatatgctggaaagataaaggaggaagaagaatgggaatgcgaggattagaaacacctgtcagaaaaatcagaagacaagtattccgtgaagtatcgaaagtagcatttgagtcaacatcagagaatctgattgaagagattgaggaaatcccatatcgtcttgtgacggaggatggagaaaaatatagggacagtatgtatcgtgcgagagctgttgtcagtgagcgtgtacgccttgcgatgggaatgtctttgcgtccagaagaccgtccggttcatattacagcaggagtggaagaaagtaatatttctgagaagtattatgagccgccgctcatgcaggttgtgccatccgcgtgtgctgcgtgcgaagagcgtggatatgaggtcagcaatatgtgtaaaggatgtctggcacatccatgtgcagaggtctgtccaaaagatgcaatctctatggtaaacggacattcttatattgatcagtcaaaatgtatcaagtgtggaaaatgtaagtctgcctgtccatacgatgcaattgcaaaaaaagagcgcccatgcgcgagagcatgcggagtaaatgcgattgtcagtgacaaagtaggaagagcaaagattgacaatgagaaatgtgtttcctgtggaatgtgtatggtaagctgtccattcggagcaatctcggataagtcacagatctttcagttgggaagagcgctcagagaaggcggcgagatcattgcagagattgcacctgcctttgttggacagtttggaacggatgtcacaccaagaaaaattaagtctgcattattggacttaggattcagcgaagtatatgaggtcgcactgggagcggatattggagctgtttcagaggcgcatcactatgcggaaaaagtagctacgggagagttgccattccttctgacgtcctgctgcccatcgtggtctatgcttacaaagaaatttttcccggaccttgtagacgaagtttctcaggaattgacaccgatggttgcgactgcaaggacgatcaaacagaagcatccaaatgcaaaggtggtatttatcggtccgtgtgcgtcaaagaaactagaggcatcaagaagaagtgtgcgcagtgatgtggattttgtgatcacttttgaagaactgcaggcgatgtttgatgcgaaagacattgattttgataattatgaaggagaatcctctttccatgatgcaaccggagctggccgtggatatgcagtggcaggtggtgtggcaaatgcgatcgagcagtgtatcaatgagtattatccggatatcgatgtgaagatcgaacatgcagaaggacttgcagattgtaaaaaattgttgacacttgcaaaggcaggcaagatgaatggatgtctgatcgaaggaatgggatgtccgggaggatgtgttgccggagcgggaacgaatcttccggtgaataaagcacaggcagaactgaaaaaatttgtgtcaacttccactaaaaaacttccgccaaaagaactggcagagattgagttgaattagaagcagaaggaagaagctttgcacggctttacaaatgcagagtgctgtgttatgataacagaagaaaagtcggagagaaagatccgaatggagggaagaatatggcattttttgcagaacttattatcacagttgtgaaaatggtatttctgatggcagtagcagttcttggagtcaaagccggacatgctctgcgtgtcagaaaagaaaaaaaataagaagatcccctttcaaatgaaaaggagaaggaacactgcctatgagagagatattgcagtaagttttcaggtctgtccggcagaggatgccgcagacagacagcgtatgcgatctcagttgaataggcagtgttttttattacagaagtgtaatctttttgccgcctggatcagaacggtatgttttctgctgtctgttcattgacaaggcaggcaaacctatttataattaggaagtatttagcaaataagtcgatcagacatgaaatagtttgccttaggaggaaaagtatgaaacaatacggagtaaatgaattgagaaagatgttccttgaattttttgagagcaaaggacatcttgcaatgaagagtttttcactggtgccgcacaatgacaacagtctactcctgatcaactcgggaatggcgccgctgaaaccatattttacaggacaggagattccaccgcgcaagcgcgtgacaacctgccagaagtgtatccgtaccggagatattgagaatgtcggaaagacagcacgccacggtacattttttgagatgcttggaaatttctctttcggagattactttaagagagaagctatccagtggtcatgggaatttttgacagaagtggtaggacttgatgcagaacgcttatatccgtctgtgtatgtggatgatgaggaagcatttgagatctggaacaaggagatgggaattccggcagagcgtatcttcaagtttggaaaagcagataatttctgggaacatggagctggtccatgtggtccatgttctgagatctactatgaccgcggggagaaatacggatgcggaagcccggattgtacagttggatgtgaatgcgacagatatatggagatttggaacaatgtattcactcagtttgacaacgatggacatggaaattattctgagttagagcagaagaatatcgataccggtatgggattggaacgtcttgcttctgttgtgcaggatgtagattctatttttgatgtggatactgtcaaagcacttcgtgataaagtgtgtgaagcagcgaacgtgacttacaagaaagatgcggatcaggacgtatcgatccgtctgatcaccgatcatatccgctctgcaacatttatgatttcagatggaatcatgccgacaaacgaaggacgcgggtatgtgcttcgccgtctgatccgccgcgcggcaagacatggccgtcttcttggaattgaaggaaaattccttgcaaaattaagtgagacagtcatcgaaggttccaaagacgggtatccggaattagatgaaaagaaagattttatcttcaatgtgctgacgcaggaggaagataagtttgacaagacaatcgatcagggattgcatattctctcggtgatgcaggaagagatgaatcaggccggagaaaaggtactttctggagaaaatgcatttaaactgtatgatacttatggatttccacttgatctgacaaaagagattttggaagaaaaaggttatggaattgacgaggaaggtttccaggcagcaatggaaaaacagagagtccaggcaagagaagcccgcaaagagacaaactatatgggtgcagatgcgactgtatatgatgaaatcgatccgtctgtcacaaccgaatttgtcggatatgacacactgtcctgtgattctaagataacagtgcttacaacagaaagtgagatcacggaagcggttgcagatggacagagagctacaatcttcgtagagaagacaccgttttatgctacaatgggtggacaggaaggtgatactggaatcatccatactgcagatgcagagttcgcagtagaagagacgatcaagctgctcggaggaaaattcggacacatcggtcgtgtgacaaagggaatgttccgtacaggagatactgtgacacttgaggtgaaatcgaaagaacgtttgaatacatgtaagaatcacagtgcaacacatctgctccagaaggcattaaaaacagtactcggatctcatgtagagcagaaaggttctcttgtgacaccagacagacttcgttttgacttcgcacatttttctgcgatgacaagagaagagattgaggcagtagaagcgcttgtaaatgaagaaatcgcaaagaacaatccggtcgtaacagaagtaatgaacgtggaagaggcgaaaaagacaggtgcgatggcacttttcggagaaaagtacgaagaagatgtgcgcgttgtcacaatgggagacttctctaaagaactttgcggtggaacacatgtaagtaatactggtctgatcacaacatttaagatcgtgtccgaatccggtgtggcagcaggtgtgcgccgtattgaagcactgactggagacggtgtatttgcttattataaagcacaggaacagaagcttgcagaagcggcaaaattattaaaagcaacaccagagaatctggcggagaaaatcagtcatctgctcgcagagacaaagtcacttcacagtgagatcgaaagcttaaagagcaaagcggctcaggaagctgtcggcgatgtgatgaatcaggtagaggagatctgcggagtgaaagtgcttgcagtccgtgtggaagatgtagacatgggaggacttcgtgagcttggcgatcagttaaaagaaaaactcggagaaggagttgtagtgatcgcttcagcagcaggtggtaaggttagcctgatggcgacagctacagaaggtgcgttaaagaaaggtgcccatgcaggaaatctgatcaaagcaattgcgggtcttgtaggtggaggcggcggaggtcgtccgaatatggcgcaggccggcggaaagaatccagaaggaattgacgcagcattgtcgaaagcgaaagaagtgttagcagaacagattcagtagatgcgtgcaaactggttgatttttttgaaaaagtctgaaaaaagaagaaaaaagtaataaaaatcattccgaaaatttgcaggaaactattgacgaaatcaaaaaatatgctataatcatatgtagtgcaataaaaatacccgaacagtcgtatgatgcacaatatagggctggaggggaggttaggtgtgagactatgtcaaatgtaatcgtaaaagataatgagacgttagatagcgctttacgcagattcaaaagaaactgtgcaaaagctggtattcagcaggagattcgtaaaagagaacattacgaaaaaccaagcgtaagacgtaaaaagaaatctgaagctgctagaaaacgtaaatataattaatgaatatgtgcagaagtgaggagtgtttttacaaacactcctttttcaatgtgtaaagatagaaagagcttaaatggtttcatataaatgatgagaagaatacaaaaagaggagaaaaaagatgatagatactgtgatttttgatcttgggaaagtgcttgttgagtatgactgggaatcttatctaaagcagttttgttttgacgagaagacttttcaagtgttggcagatgcgattttcttaagtgaggcctggatccttggggaccagggtgctgttacaccagaagaatggctgcagtgctttcttcaaaatgcaccgcataatgagaaggaagtgcggcaagtatttgaaggacttgcgggctgcatacataaattcccttacacagatcgtctgatcgctcattttcgtgaaaaagggtgccggatctattatctttccaattattcggaaggattatatgaaatgacaaaagaggaactgggatttatcaatagctttgacggaggtgttttttcttacaaagaaaaatgtataaaaccggaagaaaagatatacaaaacccttctgacgaggtataatataaaaccggagaatgcgatattctttgatgacagaccggagaatgtagaggcggcaaagatgctcggcatccagggcgttgtttttacaccagaagttgcagaagaatatcttggataaatgagaggaaggtaccgaatgagaaaagtagtaaaatttggcgggagttcgcttgcaaatgcggctcagtttaaaaaagtaggagagattatccgggcggatcagacaagacgctatgtagttccatctgcaccgggaaaacggcatattaatgacacgaaagtcacagacatgctctaccactgctatgaactggcagagaaaggaaagaaatttcttccactgttaaacgagatcaaagcacgctatgaagaaatcattgacggacttcagctggagttgtctcttgacaaagaatttgaggtgatcgcggaacagtttttaaaaaaggcaggaagagattatgcggcatccagaggagaatatctgaatgggattgttatgagcagttatctgggcatcacgtttattgatgcggcagaagtgatcttttttgataagcaaggaaatcttgatctgacacggaccgaagatgtactcgcgaaacgtcttgaaaatgcaaatcgtgcggtgattccgggattttacggaatgggagcggatggaaagatccacacattttcaagaggaggatcagatattacgggatcgatcgtggcaaaggctgcgaaggcggatatgtatgagaactggacggacgtctcgggatttctgattgcagatccaaggattatccacaatcctcagccgatcgagacgatcacatacagagagttgagagagctttcttatatgggggccacagtcctgcacgaggatgctatctttccggtgagaaaagacggaattccgatcaatatccgcaataccaatgcaccgcaagatcctggtacgatgatcgtggaaagtacctgccgtcagtcgaagtatacgatcaccgggattgcaggaaaaaaaggatttgcttcggttcatattgaaaaagaaatgatgaatgcagagatcggttttggacgaaaagttcttcagatttttgaagacaatgagattccgtttgaacatatgccgtcaagtattgatacgatgacagtgcttgtggatcaatctgtgtttgaggagaaagagcaggctgtaatttccggaattcagcgggcagtacaaccggatcatattcagctggaatcagacttcgccttgcttgccgttgttggacgagggatggcgcgtgcgagaggaacagccgggcgcattttctctgctttagcacatgcaaatgtcaatgtcaaaatgatcgatcttggctccagtgagttaaatattattatcggagtgaaaaatgaggagtttgaaactgccatccaggcaatttatgatatctttgtaaaaacgcagatttaacagctaaagagaggacagatatatgaacattttattttttctaagaccgaagagtgatcttgcatatgtctatgacaatcacacattgcgacaggtgttagaaacaatggagtatcataaatattcttctgttccggtattgaaccgggagggaaaatatgtgggaagcatcacagagggcgatcttctctggtggatcaaggatcatgctaatcttgacctgaaaaaggcggaaaatattctgatgacagaggttacaagacgttatgattatcaggccgtgaatgcaggcgcaaagatggaggatttgatcgaccgcgcgatggagcagaatttcgttccggtcgtagatgatcagcagaattttatcggaatcatcacaagacgcgagatcatcagctactgctataagcatatggaaagaggaataaaaagtataaaaaaaatcagtaaacctattgacacaatgaaaaacagatgatagtatataggagatgccgcacagcgaggtataagaatcttatttaaggtcaccaaagctggcgagtaatgataataggaggtgccatatgtacgcaattatagcaacaggtggtaaacagtacaaagtagccgaaggcgatatcattagagtagagaaacttggtgtagaagctggagaaactttcacatttgaccaggtgcttgcagttagcgatgctgaattaaaagttggaaatccgacagtagaaggtgcaacagttacagcttctgtaatcggagatggaaaagctaaaaaagttatcgtttacaagtataagagaaaaactggataccataagaaaaatggtcacagacagcagtacacagctgttaagatcgaaaagatcaacgcttaatcaagaccatgattcaggtaacgattttaaaaaatgaaaagcatgcatgtgttggttttcgtacgaaaggacatgccggaatgagcgaggcggggcaggatattgtttgcgcagcagcttcggtactgatcattaatacagtgaatgcaattgaccgttacacatcagatgagacaagtttggtatcggatgatgaggaaggtgtaattgaatttgaactgccaaatagtccttcggagagggctgcactgttgttggatgcgatgattctcggtcttgagagcatagcagatgacgaaaactacgagcaatatattgatataacatttgaggaggtgtaagaccatgatgaaattaaaccttcaatttttcgctcacaaaaagggagttggttctacaaagaacggtagagactctgaatctaagagattaggtgcgaaaagagctgacggacaatttgtaaaagctggaaatatcctttacagacaacgtggaacaaagattcacccaggagttaacgtaggacgcggtggagatgatactttattcgctttagttgacggagttgtaagattcgaaagaaaaggaagagataagaaacaagtttctatctatccagtagcagaataataagtatgaaaataggcttcaaatcatcaggtttggagtcttttttaaattctactatctatcattacaagattctgatataataatagcattcatggaacaatagaacagagagattgacatagaaaggaaacaaaaatatgtttgcagacagagcaaaaatttatatccgttccggaaaaggcggggatggacatgcaagtttccggagagaattgtatgtgccaaacggcggaccggacggaggagacggcggaaaaggcggagatgtgatctttgaagtagatgacggactcaacacacttgcggattaccgtcatagaagaaagtatgtcgcaaaagatggagaacagggtggaaagcgcagatgtcatgggaagaatgcgccggatatcatcctgaaagttccagaaggaacgatcatcaaagaggcagagtctgacaaggtgatcgcagatatgtccggagaaaatagaagacaggtaattctcaggggaggaaaaggaggacttggcaatcagcattttgcaactgcgacgatgcaggtgccgaagtacgcacagccaggacagcctgcacaggaactctgggtgaatctggaactgaaagtgattgcggatgttgggctgatcggatttccaaatgtaggaaaatcgacgttcctctctcgtgtgacaaacgcaaatccgaagattgcaaattatcattttacaacattgaatccgaatttaggtgttgtagattttaaagatggcggagatggctttgtaatcgctgacattccgggtctgatcgaaggagcatcacagggagttggattgggatatgaatttttacgtcacattgagcgtacaaagatgatgatccatgtcgtcgatgcagcttcttcggaaggaagagatccgattgaggatatttataagatcaatgcagaactggaaaattacaacagcgagatcgcaaagcgtcctcaggtgatcgcggcaaataagacagatttgatttatgcggaggatgaagatccggtagagaagattcgggcggagtttgagccaaaaggaatcaaggtatttccgatttccggtgtttccggtgagggtgtgcaggaactcctctactatgtacgtgaacagctgaagacattggatgtacctccggttatttttgagcaggagtatttcccggaggaggaattaattacgatcgatcttccttatacggtagagaaagaagacgatgtatatgttgtggaagggccaaagatcgagaagatgcttggttacaccaatctggattccgaaaagggatttgcgttcttccagaaattcttaaaagatacaggtattcttcagcagcttgaagatgcaggcatccaagaaggagacactgtgcggatgtatggtctgcagtttgactattacaaatagaaaagagtttttgacagagaaacagaggtggataaaagatgacaacaaaacagagagcatatttaaagagtcttgctatgacgatggatccaattttccagattggtaaatccagcatgacacctgcgcttactgaggcgatcagcgaggcgctggaggcaagagaactgattaaaatcagtgttttaaagaactgtgcagatgatccaaaagaacttgcacagttgatcgcagaacgaacacgggcacaggttgtgcaggtgatcggaaagaaaatcgtactttacagagaaggaaaagacaataaaaagaaaattattctgccgtaaaggagaatgagaacaatgaaaatcggaatcatgggtgggacatttgatccgatccacaatggtcatctaatgctcggagagtacgcagccagacagttccgccttcagaaagtgtggttcctgccaaatggaaatccaccacacaaatcaggggagatctcaatccggcatcggattgagatggtgaaactggctctggaagggcatgaccgttttgaattgaatctgtacgaggcagagaagggaaccgtatcgtattcttatgatacgatacggaacttaaatgaactttacccggaacacgaattttattttatcataggtgcggattcgcttttttccattgagtcatggaaatgtccgcaaagccttctgtctgactgtacgattctggcggcatgccgtgatgagaaagatcagtcacaggtacaggagcagattgattatctgaagaaaaagtatcaggcagggatagaactgcttctcacaccgatgatggatgtttcctcaagtgatatccgtcagatggtccagtatggaatggatatcagcagtcttgttccgcctggagtcaaagagtatattcatgagcacagactgtatcttacggaggaaaagggaaagtgaaagaaaatgcaaacattcatgcaattaaaaaagaagtaaaactacatctcgacagtgacagatatgagcatacgcttggagtgatgtacacagccgcttcactggcgatgtgctacggggaagatattgagaaggcgatgaccgcaggggtgcttcatgactgtgccaaagggattccaaacagtaagaaaataaagctgtgcgaaaaataccagatcgaggtcacagagtctgaaaagaaaaatccagaattgctgcatgcaaagcttggcgcttatatggcagtacacaaatatcatgtcggtgatgagacgattgcgcaggcaatcacatctcatacgaccgggcggccgggaatgacacttcttgagaaaattatttatattgcagattttatagaaccgggaaggaaggagattccaaaactggacgagatccgaaggatgtcttttcaaaatattgatcaggcattgtttacaatcttggaaaattctctcgcctatttgcggacacgggataaggtgatcgatccgatcacagagaagacttatctatattacaaagacttatttgaaaaacggacagaggaggcataaaaatggatcactcaaaagaaatggtgcgtcttgcttacgaggcgctgagcgataaaaagggagaagatatccgtatcatcgatatctcacaagtatctgtacttgcagattatttcatcattgcaaatggttccagtgaaaatcaagtaaaagcgctggtcgacaacgtggaagaatatctgcacaaaggtggatacgaagtaaaacaaagagaaggacagggactcggaaattgggtactgttagatttcggcgacttgatcgtgcatgtatttgacagagaaaaccgtctgttctatgatttagagagaatctggagcgatggaagaaccgtggaaatcgattctttataagaagcggatagaaaaacagatgtctgaaaagcagagataaagcttttgggacatctgttttttgttttgttattgttgtaagttcttggaagcggtgataggctcttcgcttgtaaatgcacggaaaatctggatgatcgacaggtgcagatatggcagatattcatcgatggtcaccggttcctcaaataggatacagttgtagcaggttgcattgatcagttcaatgatggtaaacagcatcaactcaggatctttgcagccaatatgatttttcttcagcattctcagatagtaatcgtaaaattcttcagactcttttgggacattgcttgaaaaagcagtgcgaaaaattccccaggatagattttttgcgagaaactgaagaagcgaatgatccttcttcagacgctcgatgatatagtctgccacaaagaggagttcctgctcgaatccatttatcggttgactgacaagagctttgtaagcatcgcagaaaagttgtcctgccttatagacaatcagtttatcacgcaagtcatatttgtctttaaaatataaatagaaagtacctttcgcaagacctgcccgactgacgatgtcagagatcgttgtctttgcgaagcctttgtctgtaaataattcaaatgcattctgaaggagtgcattttttttcacctttttatttgtttctaattttcccactcgaatccctccaattttttgctcatatgtattatttacgattccaaaaagaaagtcaagctataaaaatgaccaaatttcatttttagtattgactattagtcatttttgaatataataaagctgtaaagaaaaaagaaaaagtcaggagatgattagagtggtcaaagttggtaagtggatcgccaaacacaggatatttattttattagtaagtatcttactgcttattcctgcggcaatcgggaaagcagagacaaagattaattatgacctgctcagttaccttccgggtgatctggaaacagtaaaagggcaggacatccttgtagacgaatacggtatgggtgcattttccatggttgtcgtcgaagggatggaattaaaagatgtacaaaaactggaagaaaaattcagcgaagttgatcatgtgaaagatgtgatgtggtatgacgatgtggcagatatcagccttccggtagaaatgattccgaaagatttacggaaagcattttttaacggagatgcgacaatgatgcttgcattgtttgataatacaacttcttcagatgaagctatggaagctgttacaaacatgagaaaaattgcagataagcaatgctttatcagtggtatgacagggattgtcacagatattaaaaatatctcattacaagaacttccgatctatgttgtgattgcaacgctgctttccttctttgtgttggaattgacgggaacatcatttctcgtaccaatatttttcttgatcagtattggtgcagcagttttatataacttgggaagtaatatttttctcggagagatttcttatattacagaagcattaacagcagtactacagcttggagtgacgatggattattcgattttcctgctgaacagctatgaggaaaataaattaagatttccaggagaaaaagaacgtgcgatggggcatgcgatcgcaaatacatttaagtccgttgtgggaagttccgtcacaacagttgcaggatttatggcactttgctttatgacatttgcacttggcaaagacttaggtattgttatggcaaaaggtgtagtgatcggtgttttatgctgtgtaacgttattaccatctttgatattgatcttcgatagagcgattgaaaagacaaaacatagaccattgattaaaagtattgataagccatctgcgtttattacaaaacactaccgtctgtggctcattctgtttgcagtgctgctgttcccggcaatttacggaaataatcatacgaaaatttactacaatattgcacagtcactcccggatacacttccggcaaacgtggcgaacaagaaactggtagacgacttcaagatgagcaatatgcacatgatcctgatgcagaaggatatggatgcaaaggataaaagaaagatgctagaagagattgacgaagtcgatggagtcaaatggagccttggaatgaacacattattcggaccgaccattccggaatccatgatcccggatgatatgaagaagatgcttcagagtgacaattatgaattggcatttatttgttcggaatatgaatctgcaacagatgaggtcaacaaacagatttcagaaattgacaagattgtaaaatcttattccaaacatgcaatggtcatcggagaggctcctctgatgaaggaccttcaggatacgaccgatgtcgatctgaagacagtcaatgccatttcaatccttgcaatctttatcattattatgatcgtgtttaagtcgatctcccttccggtcatccttgtggcggttattgagttcgcaatctttgtcaatatggcaattccatattatcagggaacgagccttccgtttgtggcaagtattgtcatcggtactattcagcttggagcaactgtggactatgcgatcctgatgacgagccgttatcagaaagaacgtggaaaaggaaaagataagaagacagcgatttcaatcgcacacagagcaagcatgctttctattatcagcagtggattcagcttctttgccgcgaccttcggtgtggcgctttattcaaaggtagatatgatcggctccatctgtacactgcttgcgagaggtgcattgatcagcatgtttgtagttattttgatcttgccggcgatgtttatgatctttgataaagtaatttgtaaaacatccgcaggatttcttggcaaaaaaactgccgaaaggagtaattagatatgaatagaaataaagtaagaagtaatacaaaccggaaaatggatctgaaaaagaaaatgacagcagggcttgcggtcggcatggcaggattgatgggaacaactccagtttttgcagcggagccagcagataagaaagtctcaaaagatgagaccgtgtatgtgaatgcagatgcacagggaacagaacaggaaatcacagtttccaactggttaaaaaatgccggagcagaaaaaaacttaaaagatgagacagaacttgaaaatgtcaaaaatgtcaagggagaagagacatttgaagaaaatggagatgcaattacatggcagacaaacggagtagatatttattatcagggaactacagataaacagttgccggtatccatgaaaatgacttactatcttgacggcaaagaaataacaccggaagagttgaagggacagagcgggcatttaaagataaaaattgactatacaaataatgcaaaaaagaccgtgaacattgatggaaagaagcaggaagtgtacagtccgtttgtgatggtgacagggctgattctgccggatgagacgttttccaatgttatgatcgataacggaaaagtaatctctgatggacaaaaaagcatggttatgggaattgcaatgcctggattaaaagagagccttggtttaaacaatgaagattttaaggaagtatctgaggatatccaattgccggaaagtgtagaaatcacggctgatataacaaactttacaatgggatcgacgtttacaattgcattgtcagatcttcttgacgatgttgactggaaaaacgtgacagatttcgatacgctgaaaaattctttaaatgacttggaagatgcggcacttcagctggtagacggttctgcccagttatcggaaggtacacacacacttggatccagctatgcggagtttgaccaaggtgtgcagacactgaaagatggaatccatacacttcaaagcggcgctggagaattaaagagtggtgtagacagttacacagcgggagcagatcagttaaatgcgggaatccagcaatacctcggagaaaatggagagctgaatgtaaaagttacagaatatgtagatggcgtgaataaggttgtaaaaggggtagaagattatacaacgggcgcttctcagctctctgccggaatcacttcctacattggtggtgagaagcaacttgcagcaggagcagataagctgactgcattaaaaaatggcctgacacagacaaaagatgcagtcggacagctttatgcggcgattgatggaaccggagacaatgatattcaggtggcttctcaaaaacttgcagaaggaacaaaaaaattaaatgatgcggtaaatagcatgaataacctactttccaatgtagatacgatgacagccacaggaaaagaattgatcacacagacagaaggactttctgaggtgatgcagaagcagattgcagttccagtgcaggaaatgatgaaaaacggccaggaattgatgaagattttaagtgctgttaccactcaattggagacgatcagcgcagatagtgaggctgccgtttcacaggcaaaagaaactgctgtcagtgaagtaaatgcacagattgcagagcgaaatggccagatccaggcggcaaatcaggcagcggcggcagccaatgagcaggtggaagcggcaaaagctcagattagcgctcagattgcagaagctgaagcaaatggaaatacagaactggctgcttctctgcagagtgcacttgcggcagtttctggaatttctgtagatgcaggagtttccgaaattgctccggttacagtgccggatgtgccggtaaaagttgaatctgttgacacgacacagatcaaagtgttgttagaaagtatgcagaattctttcggtgaaatagagggaacggtaaacggactgactccacagttggcagaaatgcagaaaaagatggaagagatcacaaatttgaaaaaacagattccgtcaggaatggcagatccgttaaaagccagtgtgcctgaactgaatacaagaatgcagggactcaacgcagcaatcggagggtatgctgcgaatatgaagaaattaaatgatggaatggcagtgactgtgcctgaagcttctcagggcatcgatcagctcaatgcaggatttgcacaacttggcgcagccaatgatgtactacttcaaggtgcagcgaaacttcagcaaaatacaccggtactcgtagaaggagtacagacattggcgggtggcacaacagagttgagcggtggtttgcatcagcttggaacacagctttcttccggaggtgcacttctcgcaggaaatagtcaggcactgagagatggagtaagcacacttgtacaaggagctggccagctttctgatggtggtaacacacttgcttctgcaagcggagaagtcaagaacggaattgcacaactttctgatggagcttctcagttaaaagatggtgcagaaaaattcaatgaagaaggaattaagaaactgcagaaaacagtggaagatgcattggagaagatcctcgataaagtggatgcactgacatccgaagactgcgcttatgacacttatagtggaaaagcagataatatggatggaaatgtgaaatttattattgagacagatgcaattgaataaagcaagcaggttctgttagggcaaagaaaagggacaaaactttataaaataaagtggagttccttttctttttgcgtgctgggattctatcgaggcattccgcagtttctaagaagttctcttgtgaaacggacagtattgtatatttttctcttaaatattggacatgaaaaaaataatataaaataaatggaatgttgaaatttgctttttacgttgttacaatagagatactgttcacaggacataataaagaaagacagttcggacagggctgtctggaaacagaagggaaaatgaaatgtcaacggaattagaaaagtattataataaattttgtgaagaaaaacgcctgacgagaagacacggaaaggtagaatatattacctcgatgaaatatatccataaatatctggaaggaaaagaaggagcaaggattctggatgtaggtgccgggaccggaaggtattcggtgcagcttgcagaggaagggtatgatgtgacggcagtagagcttgtcaaatacaatcttggaattttaaaatcaaagggaagcagtgtaaaggcttatcaggggactgcattgaatctgtcacggtttgcttccaattcttttgatatggttcttgtatttgggccaatgtatcatctgtatacgatggaggataagatcaaagcgcttgcggaggcaaagcgcgtagtgaaaccggacggggtggtacttgtctcttattgtatgaatgaatacagcattctgacctatgggtttaaagaaggacatatccgggaaagcattgcctccgggaaggtcagcgaagagtttcatgtacaggcagagccggaggatctatatgattatgtacgtctggaggacattgctgcaatcaatgcaggggcaggcatgaaacggattgagattattgcggcagatggtccggcaaattatatgcggcagattttaaatgcgatggacgatgagacttatcagacgtttattgaatatcatctaaagacgtgtgagcgcccggaattgcttggtgcgagcgcgcatacacttgatattttgcagatggaggaagaaggggatttcataaaatagatgaaggcagatgtaaagaaagacggaaaattatttttggcggaagtgtcagacaagctgcgtgacagacttacaaagcttgcagagacacttcttgcgggacagcaggaaattgaaaacatgcatgcatattactgggagaattacacagagatggaccagtatgggtatgaagattttgacaatcagcaggcattgctgcatcagatcaatgcaaacaacgaatcacagcttttatatcagcgcttccagaagatggcagatgccccattttttggcagagtggattttctttatgacggggatgaggaagcggagattttttatatcggcattggaaattttgcggagcgcacaggagcaattccgctgatctatgactggagagccccggtgagcggactgttctatgactatgataaaggtcctgcttcttatgaagcgccaggcggaacgatggaaggaactattgaggcaaaatggcagtacaagatccaggctggaaagatgatctatggatttgagagcgatgtaaaaatcgatgatgacattttaaagaaggaacttgggcagaatggggacgtacagttgaaaaacattgtccgtacgatccagaaggagcaaaatgatattatccgcaatacaaaagataagattttagttattcaaggagcagcaggaagcggaaaaacttcggtggcattgcatcggattgcctatctgctgtatcatgacagagaacacttaaaatcatccaatattcttgtactgtcgccaagcggtgtgttttcagactatatttctcatattttgccggaacttggggaagaaaatatccgtgagatgagttttgatctgtttgcttatcaggaattaaaaggaatcgttccagattgtgaggatcgctatcatcagatagaacggcagatggaagggatgagcaaagaggcacaggcgcgctatgagctgaagcagtctcaggcatatatcggagcagtggaaggattccttgtaggactggaggaagatcttgtagaactaaaagagttcgagtggcgccagatgaaaaaaacagaggaagaactgattgagctattctactttaaatttcaggaaattccgcttttggagcggatgtatgcagttatggattatgtggtagatgagtttgaaacactgtatgaccgagatttaagtgaagaagagctggcagccgtacgagagaaatttgaccagatgtatgtgacgagggatgtgtaccggatctataactggttcttagaagaaaacggatgggagcagttgccggatgtaccttatgagagccgtatgctctcctatgaagatgtatttccgatgctgtatttgaaataccggttaagtggcaaggcaaagcataagcagatcaagcatctggtcatcgatgaaatgcaggattactcttatctccagtatgctattttagagacattgttctcctgcaggatgacgattttgggagaccgggctcagacgatggacggcaagatccaggatgttcttacatttcttccgaagattttcggaaaagaaatccgtacgatcattatgaataagagctaccgaaatacgattgaaattgcacgttatgcagaacagattacaaatgtgaccggattggaatttcttgagcgccacgggaaggcggtggaggaaaaaacggtttcgggtatcgttggagcgctccgggacatcgagggacatctgcacttaagaaagaatggagtgcagatcaaagaagctttttctgaaacagcagcggacagaacggagcacacagaggatgctttcgagacggcggcgatccttctgcggacggaagcggaggcgagggtggtctacgaatatctgaaagagcagcgggaagatattcattatattgatcgggacagcagccattttgaaaagggagtgacggtcacaactttctatcttgcaaagggattggagttcgatcaagtatttgtattgcgtgaacagacagaaagtgcttttgaacggcaggcggactatatctgtgcgacaagggcgctgcatgaactttatctgtattacttggaagaaaaataagacagatgtcgggaagtgggcttcctatagcgaacaatctgtaagaagaacgggagagaaacatgagaagagaaatagatctgaaagaaatatcggacggcaggctttatacagaaaatgacttggtgaaagcaggatgcggggattgccagggctgttctgcctgctgccgggggatgggaacatcgattgtgctggatccgcttgatatttttcggctgacaacgcagttagatatgacttttgagcaattactgcaaaagtatgcagaactcaatgtagtagatggtgtaatcttgccaaacttaaaaatgaccggagcggaggaagcatgcgcttttctcaatgcagaggggagatgttccattcatccgcatcgtccgggtatttgtcgtctgttcccgcttggaagatattatgagaaccatcgttttcagtattttctgcaaatacacgaatgtccgaaggaaccaaagacgaaagtgaaagtaaagaagtggattgataccccggaattgaaaaagaatgaacagtttatcaacgcatggcatgattttatattggaaatgcaggacagacttttaaaactgggagatgaaaagacaagccgtgagagcaatctctaccttttgcaggaattttttctgacaccgtatgagaaagagcgtacattttatgagcagtttgcagaaaggcttgcaagagcaaagaaggttttccgatagcagtttttttgacagagaactttacggaacgatgataggaaggagatacgaaggaaatgaaatatcagatcagaaaggcaaagcagtcagatcttgctgcacttgccgacgtggaggcatgctgttttccggtgagtgaggcagcttccaaagaggcgatccagaagcgcctggagacatttggagactgtttctttgtggcagagatgccgcatggggaggtgattggtttcatcaatggttgtgtgacagaccggactaccatctgtgatgaaatgtttgcagatgtgacatatcacagtccagaaggggcgtatcagtctgtgtttggactggatgtactcccacagtaccagcgaagagggattgcagcagatcttatggaacatctgattgcagatgcatggaagcggggaaagaaaggaatgatccttacttgtaaggaacggctgattccgtattacgaacggtttggataccgaaatcttggaaagtcacaatctgtccacgggggagctatctggtatgatatgctcctagaaagaggtgaagcgattgattaaaacctatgtagcgtttgaccttgagacgaccggactcagcgaagagagagacagtattatcgagattggcgctgtgaaagtgacagatggaaaagtgacggatcgtttcatggagtttttgaagccggcagaagagatttctccgatgatcacacaaattaccgggatcacaaatgaaatggtggcacatgcgagaaatacaaaagaagtcattgatgattttatgggtttttgtggggaagaagtgctgctcggacacaatattctgtttgattataagtttatgaaacgatatgcttgtaagtatcagcattcttttgagcgaagagggatagatacgttaaagattgccagaaaagtacataaggatctggaatcaaggagtctcgaggcattgtgtgcacactatcagatcaaaaatgacgcggcacaccgggcatatcacgacgcccttgcaacagcaaaactatatcactgcctggggcattattttgaggaaaaggaaccaaatttatttgtgccggaaccacttttctatcaaccgagaaaagaacagccggcgacagagaagcaaaaacggtatttggaaaagttgtgcggctggcatcggattgcggttccggaggatctggaagctatgacaagaagtgaggcatccagatttattgaccgagtgatcgcaaaaagcgggcggatggatcgcgaataagaaaacctgtattggatattgatttttcagacatgattttatacaatgaaggcagatgatcattgcagaaaaataatcgaaaaaactgttatttttctgacaaaaatctacaatattccctttagatgggaagtacgtgtagaaaaggaggaaaacatatggttcgtgaaatcatggattacatttcatcttgtgatgaagcagtgggaaaagctttgtatgcagagtatcacaggcagcagcggaatctggaactgatcgcgtctgaaaatattgtatccccggcagtgatgctggcaatgggaacggttccgacaaacaagtatgcagaagggtatccggagaaacgatattatggcggctgcgaggaagttgacgtattggaagatctggcaattgagcgggcaaagaagctgtttggtgcagaacatgcatgtgtgcagccacattccggtgcaagcgcaaatcttgctgtatatcaggcgtttttggagccgggagatacggtaatgggaatgaaccttgcacacggtgggcacctgacccatggatctccggtcaacatttcgggacgtctgtatcattttattccgtataatgtcaatgccgatggagtgctggattacgaagaaatcaggcgccttgccctggaacatcaaccgaagatgatcgtcgcaggcgcttcagcatatccgagggaaatccggtttgatctgtttgcagagattgcaaaggaagtcggagcttatcttttcgtggatatggcacatatcgcagggcttgttgcggcaggacttcatcagaatccggtactctacgcggatgtggtatcgacgacgacgcataaaacattgcgaggaccgcgtggcggtatgatcctctgtaaaaaggagtatgcaaaacagattgataaagcaattttcccgggaacacagggaggtcctctgatgcatgtgatcgcagcgaaggctgtctgcttcggggaggcattaaagccggagtttcggacatatcaggaacaggtggtaaaaaatgcaaaagcattgtccactgcattgatggaagagggatttcatcttgtgagcaacggtacagacaatcatctgatgcttgtagatctgcaaaatatgcacattacaggaaaagaacttcagaatcgactggacaatgtatatattactgtcaataaaaatgcagttccaaatgatccggccagtccatttgtgacaagcggtatccgaattggtacacctgcagttaccacaaggggacttaaggaagaggatatgaagaccattagccatctgatcaaactggcagtgacagagtttgatacgaaggcggatgagatccgtgtggctgtcaatgagatctgcagccgttatccaatctatgaataacgaataatttgccgtgccatacatatacttaagataaaaagtatgtgtatggcatttcctatgagtcgagagtatgaaaaagggacatttaaacataaaatggcggaagcggcaaatcttccgaaagatctggcactgggacttccggttgtgcatgtaactgggagatccgaagcatgcgtggaaaattacagagggattttagaatataccgattcgcttgtgcgcgtgcagacaaagtgtgggcagatccgctttaccgggaaacatctacaaattgaatattatatgaacgatgagatgaagatcaccgggagaattacggctatggaatacgtgtgatcgggatgtttcacattggtttctgaagcaatcggaaaatagttccaggaggatcctatgtttgttttactcatgcgttatttgaaaggttaccttcggatttgtgtaaccagcacttcccctgaacggtttttaaacttatgccgaaaccgggggattcttctgtgggggctgtccccgcacgggagagattatgaaatgtatatcagcattcgtggatttcggaagttaaagccagttttaaaaaagacaaagacaaaagttaccattgaggaacggtttggactaccgttctttttccataaatatcgaaaacgaaaaatgtttttctgcggggcggtcgggtgtgtgatgattgtttatcttctttctctttttatctggaatatccatatagatggcaatcagacgagaacagatgagacgattcttgcttttctggaagaaaaacatacggtacacgggatgcttcgaaaagatgtggactgtgagcagatcgtaaaggatatccggcagcagtttgatgacattatctgggtatctgcgtacgtgaaaggaacaagactgatgattcaggtgaaggaaaacagtgatacgattacaatgcctgccacagagatggagaagccttctgatattgttgcggacaaagacggggttgtaactgagattatcacgcgcaaaggagtaccgcttgtccatgccggagatgaggtgaaaaagggagatcttcttgtttcggggagagtggaagtattaaatgacagtaaagaggtaatcggttatcaatatcagaccgcagatgcggatatttttgtacagacggtctgttcatatgaagagacgatggagcgcgcttacgagaaaaagatctatacagagaaggagcgacggaaatactatctcaaatggaacgatataaaggtttctgttgggacgacaaaaaatcagtatcaacacgcagagcggctgacagaggagtatcggtggacactaggagaacattttgtacttccggtttctcatggaatggagagggaacgagagtatcgtctgcagaagaaactatatggaaaagaagaggtccagacgatgctcagtgaaaattttcacagattctgtggggaattagagaaaaagggggttcaaattcttgaaaataatgttaaaatacacataggtcaaaatctcgccaccgcaaagggaacattgaccctgatcgaaccggcgggggaacagagagaaaccgaaattatagaagtagaacaaaaaacagaaggggaacagtaaatgagtattctggaagaaatcatagaaataccagtggaacatgagcagaatgtcttcggacagtttgatgcatttgcaaagaagatcgagcggacacttcatgtgacattgatcgcaagagatggaaaggtaaagattcttggagatgcagcgcgtgtaagtcaggcaaagaggacattgacgcagctaacagctctctcagagagagggaatacaatcacagagcagaatgtagattatgcgctgtcgctcgtattggaagatcaggaagcggggattgtggagattgataaggatatcatctgtcatacacttcagggaaaaccaatcaaaccaaagacactcggacagaaaaaatatgtagatgcaattcgtgatcagatgatcgtattcggacttggacctgcaggaactggaaagacataccttgcgatggcaatggcgatcaccgcatttaagaacaatgaggtgggcaggatcatcttgacgagacctgccatagaggcaggagaaaaacttggatttttgccgggagatctgcagagcaagatcgatccctatttaagaccgctctacgatgcactgtatcagatcatgggggcggagagctttttgaaaaattcggaaaaagggttgattgaagtggctccgctcgcctacatgcgaggacgtacattagataatgcatttattattcttgatgaggcgcagaatacaacgccagcgcagatgaagatgtttctgacaaggattgggtttggatcaaaagtagtgatcaccggagattctacacagaaggatctcccggcgggaacaacctccgggcttgacgtggcagtcaatgttgtaaaaaatctggaggatatcagtatctgcagattgacgagcaaagatgttgtcagacacccgcttgttcaaaaaatcgtcaaggcatacgaagaatatgagaagaaaagcagcgcgaaaaatataggaaaagaacgaaggagaaagaaataaatgaccgtttattttgaggaagagggagcgtatcagctcccgtttgactgcagaaagctggctgaaaaagttatcgccgaggcagtggactacgagcagtgtccctatgaaacagaagtgaacttgcttctgacaatgaatgaagaaattcgtgaaatgaatcggcaatttcgggaaatcgaccgtgcgacggatgtgttatccttcccgatggttgactatggaactccaggagattttgagttccttgaggaagatgactcttattttcatccagaatcaggagaactgatgcttggggacattgtgatttccaaggagaaggtaactgcacaggctgaagagtatgggcatacggaagagagggaatttgcctttcttgtggcacacagtatgctgcatctgtttggttatgaccacatggaagaggatgaacgtgctgtgatggagcaaaagcagagggagatccttgagcggctcaatatattaagataacaaaagagggataatatgacgaaacaaattaataaaaacagcggttttctactgcagggtgcgatccttgcagcagcagccgtcattgcaaagatcattggagcagcctacaagattcctctgacaaatattcttggggatgaaggaatggggttttatggctatgcgtttgaggtctatgcaattgcgctgatcctttcctccttcagtctgccgcttgcagtctcaaagcttgtgtctgcacgtgtggcaaaaaaggaatataaaaatgcgatggcgatttttaaaggatctattctatttgcaatcggtgtagggctccttgctgcactggtcgttttttttggagcagatttctttgcagataaggtaatggcatcagcgccaagtgcctatgcacttagagtattggcgccaggactttttatcgtggcagttatgggagtcgtacgaggatatttccagggactcggttctatgattccgacagcgatttctcaggtgatcgagcagatcgtcaatgcgatcgtgagtattttaggagcaagctatctgctgaaggtaggggcagaagcagcaaaaagcaagaacagtccactgttagaaccttcctatggtgcggcaggaggaacgctcggtgcagtcgccggggcatttgtaagcctcctgtttgttctgtttgtgttgtatgcttacaagggagtgatgaaacggcagttaaaaagagatcacggtacctctgtggaaagctatggaaatatctataaggtactattatttacgattgctccggttattatcagtacatcggtttataacatcaaccagattttagatcaagtaatgtttagtaagattatggcggcgcagggacatgctgtgaaagattacatggcacttctcggaatttataccggaaaatataatacgctgatcaatgttccgcttgctatggcaagtgcactcggtgtgtctgcaatcccaagtctcgctggcgcgatcgcagtcggcgatcgaaaacagatttatgggaagatccatcattccatccgcttcacgatgttgatcgcaattccaagctttgtcggatttctgatgttgtcatcgccgcttatgaatctgctctatggagatcagagaaaaactcctgcggcgatgttaagcctcggatcaattaccgttgtgctttactgtctgtccacggtacagaattccatcttgcagggccttgataagatgacagtgccgattcgaaacgctctgatttctcttggaatccatctagtggcagtctttgtgatgcttgtaatgttgaaatggaatatctattcgattgttgtcggaaatattgttttttcactctgcatgtgtattttgaatgcacattcgatccagacggcagtcggataccatcaagaagtgaagcgaacatttctgcttcctacaatggcagcatttttgatgggagtggtatcttatctggtattcaaattgtttgatgttttgatcggtggaagagttttcccaatcctgtttgcgcttgtggcggcagtcgggatttacgcagtggcactcattctgatcggaggacttacagaagaagaattgtatgcgatgccaaaaggagatatgcttgtcaagatttttcgaaaattacatttgatgaaagggtagagaagagtgaaaccagtaaaaaaagttgcactgctccatgatctgtgcggagtaggaaaagctgcgatgacaaatatgcttccagtattaagtgtgatgggaattgaggcatgtccgattccgacgatgttattatccacccacacaggaggatatggaaaacctgcggttgcccgcatctctccggaatatatcaaaggttgcgctgatcattactgcgaacagaatgtgaagttcgatatgatcttcatcggttatctcggaaatgaggaactggcagagtcggtattatatttcgtttcttgttttccggaggcgatggtcgtttttgatccgatcatgggagatcatggaaaatattacagcaattttgataccagctatggggaagcattaaagaagttaatcccctgtgcagacctgttgcttcctaatctgacagagagttgtctgcttgcgggatatccatatgcgaaagaactgtcccgaaaggatttgaaaaaaatctgtgaaacactgcacgagctgggggcgaagcaactaatcatcaccagtgttccggatggcagaagtgagaagtccatcctactttttgagcaaggaatgatgacaatgttggagaccacacagctttcggcagaatttcacggaaccggagatgcatttgatggagtcctgatcgccagtattttaaaaggctattctctcaaagagagtatgatcgaagcacaccgcttcgtctatgcctgcatggaggagagcctgaaaatggaatatgaagaaagagaagggctgatgatcgagaagaatctgtacatgcttgtataaaatagaagaaagagcggatactgtataaaaaaggagtggcatggaaatgaagaagagatacagtatcggctttttttgttttgcctgttgtgcgctccttttgctgactgccgtctatcaaattcgttaccgaaaggcttatgaggaagtggaacggctggaggcacagttggcagaagcgcagagacagaaagaaaaaagcatcagtgcagatggaacggcaaaaaaagagaatggatatttcctgaaagaaaagaatggataccttgtagtttatctcgcggacggagagacattctatgagagtactgggatccgaacagagagtcttcccgaaaaactcctagaggagatccgacaggggaaatatatcgaaactacaaaagaactttatggttttttggaaaattattccagttagattacagtagaaaaacagtaggaaaacagcaaaaacagccccttccggctggactttgtatcagatatggtgtatgatatagaatggcatgcggcaaaatcttggcgaacttctcagttttgtggcatgccgtttcaggcaaatgagaaagaacagtgaggtaaagagatgttagaagagaagattcagagaatcaatgaattatatcgaaaatctaaggcagaaggattgacagaagctgaactaaaagagcagaagattcttcgcgcagaatatattgaggctttcaagcgaaacttacggggacagcttgataacatttccatcaaagaaccagatggaagcattacgaatcttggagagaaatatggaaaaaaagccgcgaacaaaaaaggacattagaagacagatccttgcagtgaggcggacactccctgtggaggaggcaaaagaaaagagcagagaaatctttcagaaagtaactgcacatccatggtacatagaggcagatactgttttctgctatgcaagtcatgacggagaagtccggacaagagaactgatggatcagattcttgcagatggaaaacggcttgcgcttccgcgtgtggaaggaagagagatgacattttatgaagtaagagagccggatcgtctggaggaaggtgcctatgggattgaggagccattgcctgaaaatcccgtgcgaaaggagcacagcgaaaaggccttgatgatcattccgggaatagtatttgaccgcaggctgcaccggattggatatggcggtgggttttatgaccggtatcttgccggtgacgcaccatttcatacaatggcagttgcatatgaatgtcagtgtatcttaggagagttaccatttgaaagtcatgatctgtgtccagaggtactggtcacagaaagagagatttatcaaagatagaaaagaggtggaggtatgcttacaggacttcccaaagacccgatattattattgagtgtggtcaatacaaaattacgagatgaatacaagaatctagatgcactctgtgaagatctttctgtggagaaggaaaaattgacagaaaccttaaaggcaatcgattatctatacgatgccggacagaatcagtttatatagaaacaaaacgatgttggcaattttacgagaaaagaaccttaggaggtagaaatatgaatgtatgcgagtgtgtgatttcttgtaaatccggagatcaggtaatatatcgaggagtgaaaaaagaagatgcagaagcactttatcagcatcagtgtacgattgcgcaggaaacttattttacatccctctatcctgaggagcttctctacaatatcgaagggaaagtggaaagaatcaaggaaattcagaaccatccagtccattttcagattgttgcaattaacgatgggaagattgttggtcaggcagaagtgcgtgtagtcaagaaccatttgaaatataagcatcgggcgaatataggaatttctattgacagagatcactggggaatgggaattggaagcagcctgatgaaacttgcgctgcatcaggcaaaagagaatgggcttgagcaaatggaacttggtgtttatgcagataatgaacgggcaatccatctgtatcagaagtatggatttgagcagtgcggaatctggaagaatgcgttcaaattaaaagatggtacataccgagatgaaattctaatgagtaaaattctttaagaatctcctgcgactgctgcccagtagtcaaatccaaggatactttcccatcggcggacttcaacagttccgccgatttttatgttctgatagtcagatttgcttacttgaagctgttctgttttcccttgccgttcgacatagacgtaataataatcatatacaactctataaccagatttcccggattctttttccaaaacaatcaaatattccgtgctcgcaggtgtaaacgtcaggattcggttgaccggaagcacaagtacgatcccaagaatgagcgcagagagcacgacagaaactgtacgcatccagtgctgcttcaattgtttcttatgctgatgaacagcaaatagaagcaagaggaggactgcaaagaaacatgcatacagatacagttgccagtcgctgcacataaaaaggtaatatatatagttgatagagaaaaacagtgtgaaaaatccgcccatgacagggagagggaggatgtagtaatctaattcactgtctggtttctcgtaaggcaacaagtgtccctgaagcagataaatatacggataaaaatgaatatacacaaaccataaagtgacaaggatcaaaactggcgcgagaaaatataattttccctctaaaaatgagctgaaaatcccggcgggaatgagaagccatccaaggatccgtagccgttttcttacttttttaatcgtatccagagagacacttccccggaattgttctaaagttgtctgtgcatggagttcgaaaaggcagctgcacttcgtcaaaaatggaagtgctggaagataccgaaaaacatcatcaccatctgtaagcagagcagcgatatccagagtaggaattgcataggtctccaacagcatttgcactttttcaaagtttttatcatcttccttgatttcacaaattcgttttctgcttttggaaatcagaatgtagtgtgacggttctgtgttttgtgtgcgtgccaaagaggtcttgccagaatcagaatttgaaagatcccgcagatcgacacgcatcagacattcgatttctgtccaaaaaactgtatatactcgctgaaatggaacatggatacagatcccttcttcggtatacaaaatttttttgcccaataggaacagctgtacaaaaagaaggatactggcgggaaagaagatgatacacgaaagaagaaaacagaggagattccccgaaacacatcctgccagtgtgaaaaaaagtccgagaaacagatataaaattgcgagaaacagaagtaatttttttcgggttttgatcggttttgtcatgagagatctcctccgtatgtatagtagttattttagattgattgtaccatgagcgaaaaatctttacaagcagcgaaaagacggcaaaaagcaaaaaggacatttaatctcatatgagaagtatgctatactatgaatctcatatgcgaagtatgctatactatgtgcatgaaagaaaattatacactagaagaacggagaattgtaatggagattaaggaaatactacaaaatcaagaatctcaggctgctatgaagcagctgatgtcagatgaaattatgaatttgatccatgaaaatatgaaaccgagagatacgatcatggcctattatcgctgtgcgattatggaagtagaaacaaaatttaaagtgttaaatgaacagttttcgctggaatatgaccgaaatccaattgaatcgataaagtctagaacaaaatcgatggaaagtcttgcaaaaaaataagggatcggaacattccgagctctttggaagccattgaggaaaatatcaatgatattgcaggagtcagagtgatctgttcgttttgtgaagatatttatatgctggcaaattgtctgctgaagcaggatgatattacattgattgaaatcaaagactatattaaaaaacctaagccgaatggatatcgctccctgcacctgattatttctgtacctattttcttaaaagatgaaaaaagagatatgaaagtagaagtacaattgcggacaattgccatggatttttgggcgagtcttgaacacaagatcagatataagaaaaatctttccgaggacttgcagaaggagttggcagaggaattattgtattgtgcaaatcaaagtgcagaattggatatgaaaatgcaaaaaattcgaaacaagatataggaagaagctatgtctgcatgatagttggaacaattttgcttgcgattttgtgaaaactttgaaaaattgttccggtgaaaagaaaaaattgttcttgtatgtatgaaaaaaaaagagttataataatcgggtgtctgcttaaaggaatgcaagagaatgataaaactgcagaggaagcagcataaaaagaaaacaaaagagaaaggaaaaattatgcaagatacccagaaaacaaaattatttgaagaaacagcgatcccgaaggcggtggcacagctggcggttccgacgatcttaagttcgcttgtcatggtgatctataaccttgcagatacttattttgtcgggatgttgaacaattcaacacaaaatgcagcagttacactggcaggaccggtgcttttggcatttaatgcggcaaataacttatttggcgttggaagttccagtatgatgagccgctcgcttgggaaaaaggattataacacattgaaaaaaagttctgcatttggattttactgtgcattgatctgtggtgtaatttttgcactgttatgtacagtattcaaagatccgctgcttataatgcttggagcagatgcaaaaacagcggcagcaacgggggcttatatgcgatggacggttacattcggtgcagttcctgcaattttaaatgttgtgatggcatatttgttccgtgcggagggtgcttctctccatgccagtattggaacaatgagcggatgtcttttaaacattgtgttagacccgatctttatccttccatggggactggatatgggggcggaaggtgccggacttgcgacatttatctcaaactgtgtggcatgtctctacttctttgtgctgatgtataaaagacgcggaaagacacttgtctgcatccatccgtcacagtttggattccagaaagcaattgtatttggtgtatgcggagtcggaattcctgctgcgatacagaatctcttaaatgtaaccggaatgacgattctaaataattttacttcttctttcggatctgaggctgttgcggcgatggggattacacagaaagtcaacatggttccgatgtatatcgcaatgggactttcacagggaattatgccgctgatcagttacaattatgccagtggaaatcataagagaatgaaacatactgtcctttttagcgcggcgctttcggttggattcatgattccggttgcgaccctttattatttgttctctggaccactgacaagtctgttcatcggaaatgaggcgatcattgcgtatggagcaagctttttaagaggattctgtctgagtctcccatttatgtgtatcgatttcctcgcagttggagttttccagtctgtaggaatgggaaaagaatcattgattttctgcattatgagaaaaatcgtgctggaaattccggcattgtatatcttaaacaaagtatttccgctttatggacttgcttacgcacagttcattgcagaatttgtacttgcaggtgcggcgatattcgtccttacaaggctgtttaagaaaatcgaaaaaaatggtgtcgcagtctcataggagtcagaatacctatggaaggacaccgtaaaaactaatcacatttcactgtaatcatagtaatgtaatcgtttttatctttgatggacatttcatttaatccttcttcgtaagcataaccggtgagtgtgagttgatgcgcgcgtgcatatgaaagaatggattggtaaatagccggaagctgctcccacctgccgatacaatatgctctcagataacttccagctggaaggactacgtcatatgtctttgaaccgtgtgggcagtaagcgaaaaaagaatcgtagcggtgaaaacaatttttttcaatctgttccatcgagattcgacttccaaaattgtcataaagatgaaaaagagttttgaggcggagagaaaactctgccgcaacagagaaatcttcttcatcataatctccggagattggtgcagagagcacaagtttccgttcgggaagtgtacatcgctcaatcttaccgtgtttggattgcatgccgatttttaaccgttctgctttttgttctaaaaaagattgtacggataagagctgattgatggattcatcgatcagctttttctttttgatcattatctgggagaacgattcatccgatggtgttgtcacatattctcggatttcatctagggaaagtcctatttttcgcaaagtaagaatgagttccaattgtgcaaattgaaaacaagtgtagtaatggtatccattttctccaatgacttccggacaaaataatccaatttcattataataatgcaaagttcgcttgttgataccagtgaattttgcgaattctccggaagaatataaatattttttatgattcataaaaacacctcttgactgtacagttactgtacattctataatacacgagaggaaaagagaaagcaatcacaagaaggaggatatgatggaatttacacttgcaaatgaacagcaatgggcaaatataaaggagatttacttggaggcttttccaaagcaggagagaaagccgtattttatactgagaagatctgtgaaaaagggaaaagcagttgtgatgacagcgacagagggaggagaacttttaggatttaccgtactgattccgtacaaagatatggttatggttgattatctggcagtatcttcaaagatacggagcaaaggtactggaagttatattatgcaaaatgtatgtaggcattatgccggaaagaaaattgttcttttgattgagcggttagatgaccaggcacaaaacagagaacaaagagttgcgcgaagaagattttatctcaaaaatggattcacttcttctgatatttttattgaaggagtgagtggagagttggaagtattaaattatagaggcaaagtttcacaggaagattatatttgcctgcaaagatatgcgcttggaaaattgctttttaaattatctaaaatcaagattgtaaaatagaagatacaaacagggttgcggcagtagtgcagcaaccctgtttctttttaagcagtttcagtattttgaagattttgtgctttgatccgtgcgatctctgtttggatttcttccattttttcttttgttaaaggatagtatttcattgcaaccaggttgcagattaatccgagaattacgattccatagcataagaatacccctacataatgcaaagaaggtgtatacggtgtatttacatctggaagggtatctttaaatcctaccattgcaaataacaatcctgcgatcaatggagcaagggaggaaatcaatttgtcaacaaagctgaacagagttcccatcagtcccggaacgtaacggccggagcggtatacttcgtaatcggcacaatctgctgtcataggaattacgatacttccggaaagccctgtaaatccagttgcagcaatagaaagaatgatatgtaaaattgtgaagattccaaacgcaagaccgccttttgcatttaccattgttgtagcatcgccaaaaagccagaggagcgcgagcagtacgttcatgacaattccgccgatacttccgatcagcattcctttgcgctggcctaagcgggtggcgagtgtaccgataccaaacatcatcagaatcatagcaggaattgtgatatatcccatgatagttccgctgattgcaaaattgccggcaacaattccgaacataacaatctgaacagttgttgtgcgggcgtttcctgcaagtttatctgtagaagctgccacgacaagcatttggatcgctctgttgttctttaagatatcccagtaatcctttgcgcggattcgctcagattttccagttccgaaaaactctgtgcgatcttttggggcgatagaaatgactgcgatcacggttgcaattgcacttccgatcgctatgattacccacagatcatggaaaagatcaacgctgtagaaagatccgtattttgtactgagctttgccgctataacagccatgattgtccataacaaagaattgtaaacaccatcaaaaatggaaaacagaggtctctgtttcggatcgtttgtaagacaagtctgtgctgattttgtcacgacacattggaatgtgtatccgatatagtaaattgcagaaattacaataaaaaatccgaatcggatagctgtattttccggaagccgatgtgtgacatggaagagaataaagctcatcacacagaggattatctgtccgataatcataaacgggcggttcttcccaaatttaccatttgtcttgtctacaaaatatccaataaatggatccgtgacaccatcccagactctcattgccatagaaaaactagatgctgttacgacggcaacacctacaaatcctgtcagatagtaggcgacatagcccattaagaatagatacatatttgttgccagattatttgcggcgaatccggcaatacgccatagcggaacccggtggattccattttctccgtaatactttgcatttgttgatgccataatacatattcctcctttgcgagtgacgattttcttctattgtatcattgaaaatcaaatgacattagaaaaaaatatagggtttatagtaaaatatatataaaaatcattaaaaaagaacaaaaaatatataaaacatacaataaaaaatgatttctaaaaatataattaaaaaaaataaataaaaactaggttgaaattttattaaaaacaataaaatttactacatcgaaaacgaaatcttataaaaagcattgcaaatctatataaaaaaggtaaaattattaataagtactgccaaattttgagagaatgaaaggaatttattatgaaacagaattacgaaacaacagtaaagagtattcagaatccagacggaccaaaactttgctggtctgaacagtctggcatgaaactaattgaaaaagatggattatatttcaaggatcttgcagggacaggagagttatatccctatgaggattggagacttccggcagagcaaagagcaagtgatctggcatctcgcatgtccgtagaacagattgcaggtctgatgctttatagcagacatcaatttatccctggagtttctatgccgtatttcggagaagtgacttataatgggaaatctattcaggaaagcgggcttccggtgtcggcaatctcagaccagcagaagacttttctcagagaagactttattcgtcatcttttgatcatttcggttcagtctgcggcagatgctgcaaagtggaataataatatccagtcgttggcagaagaattgccttggggaattccagttgcaatcagctcggatccaaggcatggaacaacggtcacatttgagtttgatgccggagccggaggagatatttcacattggccggaaccactgggacttgctgcgacttttgaaccggagttgatggagaaatttggaaagatagcatccaaagagtaccggggacttggaattacgacggcattatctcctcagatcgatctctgcacggaacctcgctggaaacgatttgctggaagcatcggagagagttccaagcttggagcggatctcgcgcgggcgtactgtgatggcttccagacatcagaaggagacagcgagatcacggatggatggggatatgaaagtgtgaatactatggtaaaacactggccaggcggaggcgcggtagaaggcggaagggatgctcattttggttccggaaaatattctgtgtatccaggtgataattttgaagagcatctgcttccatttacagaaggcgcttttaaactccatggcaaaacaggaaaggcaagttcggtcatgccatattatacagcggtatacggaaaagcaggtaattatgagaatgcaggatctggttacagcaaatatctaattacagatcttctaagaaacacctatcattatgatgaagtggtatgtacagactggtctatcacagaagatgcatctacactggaaaatctgtacggaggaaaatgctggggagcagaaaaactgacgagaggagagaggtgctatcgtattttgatggcgggtgtcgatcagtttggcggattaaatgaaaaagaaccagttcttgatgcataccgtatcggtgtaaaagaacatggcgaaacctttatgagaaaacgtttggaacagtctgctgtccggcttctgaaaaatatattccgtgtgggactgtttgagaatccatatttagacccggaagtatccgcaagaacagttggttgtgcagagtatatggaagaaggatttgccgcacagaaaaaatcaattgtcatgttgaaaaacaaagaaaatgtacttccgttgcaaaagaaaatgaaagtctatgtcccgaaaatccactggccggaaagtgtagactggatgtgccagaaaatggaggagcactgggaccgtccaatttccaaagaactgctggagaagtatttcacagtgacggatcatccagaagaggcggatgcagcaatttgtatcattcgtcagcctgatggcgctgcatttggacttgcaggtggatatgatgtcagtgataaagaagccggcggaaatgggtatcttccaatcagcctgcaatatcgcccatacactgccgtttacgcgcgggaacatagcattgcccaagatccaaatgatgatttcccagatagaacttactgtggaaagaccgtaacagtcaataatgaagatgatttggatcttgttttacatacaagagagctcatgggagaaaaaccagtgatcgtttgtgtgaatatgcttggtccaatggtagtaaaggagtttgaagcagcggcagatgcgattgttgcgatgtttggtgatctgtcaaatgcactgctggaggtgctcagtggtaactttgaaccggaaggactccttccaatgcaacttccggcagatatgcgcaccgtggaagaacagcaggaagatgttccgtttgatatggaatgccacagagataccgaggggcatatctatgattttggttatggaatgaactggcagggtgtcattgcagatgatcgtgtcagaacgtatggacatcatttgccgaaagaaaactagcgagaagacgttgaagactggcagctttttcttgaaaaagggaaaaaattcgattataatataagttcatatgaagcgggcagatactgtgagatctcttttggcagaatgcatacagtttctgtccgctatttagcagagaaaggaaaagattatgagagaacagaatcgaaataagaatcaagaaattgaagaaattcttgaacaaatggatttgagtcagccggcaccggaaacagagccgatgcgtcaatattggtttatgaagaaagcacgcgaactggtgaaagaacagtctgaaaaactgggtcgtcccctgacagcgtgcacgacaacatttggctgccagatgaatgcgcgggattccgaaaaacttcttggagtattagagcaaatcggataccaggaagaaacaaacgaggaggaagcggattttgtcatctacaatacatgcactgtgcgggaaaacgctaacatgcgcgtatatggaagacttggacagttaaatcgagtgaaaaaacaaaagccgcatatgttgatcgggctttgtggctgcatgatgcaagaaccggaagtcgtggagaagatcaaaaaaagctaccggtttgtggacctgattttcggaacacataatatttataaatttgcagagttgatcgtgacacggctggaatcacagcgcatggtcattgacatttggaaagatacagacaagattgtggaagatctcccgagcgaacggaaattttctttcaaatccggtgtcaatattatgtttggctgtaacaacttctgtagctactgtatcgtgccgtatgtgcgtggccgtgaacgcagcagaaatccggaagatatcatccgtgagatccaagggctcgtggcagatggcgtcgtagaagtgatgctgcttggtcagaatgtaaattcttacggaaagacactggaacatccgatgacctttgcacagcttcttaccgaaattgagaagatcgagggattggaacgaattcgttttatgacatctcatccaaaggatctctctgacgaattgattgaagtgatgaaacattctaagaaaatctgcaaacaccttcatctgccggtgcagtcaggaagtacagagatcttaaagaagatgaatagacgctacacaaaagaacagtatctggaacttgtgcgtaagatcaaagaagctgtgccggatatttcgctgacaacggatattattgttggatttccgggagagacagaagaagatttcctggagacaatggatgttgtaaagaaggttcgctatgacagtgcatttacatttatttactctaagcggacaggaacacctgcggcagcgatggaaaatcaagttccggaagatgttgtcaaagaccgttttgacagattgctaaaagaagtgcagagcatctcggcggaagtatgcagtgtgcatgaaggaacgacacaatctgttcttgtagaggcagtcaatgaccatgatcctgcgcttgttaccggaagactcaacaacaatatccttgtacattttccgggagaaaaagagttgattgggaaaattgtgtcggtgcgactggatgcatgtaaaggattttattatattggaacccgtgtatagtgggttccttttgtgatgtcataattttcagatttttgtccacaataaaaaggagaatttgtgtgacaggagagagacgattgaaaaaagtaagtgaatatttgtttttgtgggcgcttggcggtacgatttattatgaatttgaaatgatcttcagggggttttctcactggtccatgtttgtactgggaggaatctgcctctgtttcattgcatggcaagggaagatggttcactggagagatgctctttggcgccagacggttcgctgcgtgatctttgtggcagcaggagaatttttcaccgggatcattgtaaataaatggctcagactcaatgtatgggattatagcgatcagccgatgcagctgtttggtcaggtctgtgttccttttctgattattttttcggggctttgcgttatcggaatatttctgagcagtttccttctgcatattctgtatggggaagaaaaaccatcgttccatattttgtaggtgcaattttctgctgttttgcatgggaaggcattgttgaaaatttgtattcagaatcatagagagatagcagcaaacaaagaacactttattttttgattgaaaacatgttgataggagggataaaaaatgattctgtcaggaaaggaaattttaaaacacatagggaaagagatccagattgagccgtttgatgagaatagattaaatcctaacagttataatctgtcattggcaaatgaactgcttgtctatgaagatgaggttttggatatgaaaaaggatcatgccgtcagaaagatagtaattcctgaggagggtcttctgttggaaccacataaactatatcttggacggacgaacgaatttacaaaaacagaagggtttgtgccaatgctagagggtcgctcctctacgggacgtctcgggctttttatccatgtgacagcaggatttggagatgttggttttgcaggctactggacattagaaattttttgtgtacagccaatccggatttatccgaatgtagaagtctgccaaatctattaccacgatattcatggagagtatgactgttatcagagtggaaaatatcaaaataacaaaggaatccagtccagtatgctgtacaaagattttttaaaataggaatcagtaacatagaagacacaaagaatgaggatacatttgggaggaaaaagatgcatcagatttttgtatatggaacacttttaaaggggatgtacaattatgagatttactgcagcgcagaggactcataccgtcaaaaagcctatgtagatgggcttctttatagtctgaaaggaagaagatatccggcgctgatagaggggaaagaaagaattgccggagagctacacgaagtatctgaacagacattaaagaagattgatgagttggaaagctattttggggaaggacacccggagaatgaatatgataaaaagtttgtaatggcatatgcagaagacggaagcgaaatcggagaggttccagtctatttttacaacattagaaatgagaaaaacagagcactgttagatcagagaatcacatgtaacgattatcggaaatatgtggagtagcagaactatgaaattggagaagataaaaaaacgattggaaatgtacttatcttatttttggggaggatcatagatgtcaacagggataatgattattgggccatcaggaagtggaaaaactacattgggcagatttgtcgccgctcagctaggctacccttactttgatgtggacgattatatttggagaaaagatactaaagaaccatatactgttatgtatagtcgtgaagaaaagattagcagattgagcaatgatattttgccatatgaatattttgtgatggctggttcgatgagttctttccattatgcatttgatgacaagtttgagatgatggtttttctttatgtcgaacctgacattcgtgtacagcgagtacataaccgcgcattggaacgttttggaggaagaatactcgaaggaggcgacttgtgtgaaaatcatatgcgatttttagaaagtaatcgccgctacgagaaggatggttctccaaatctgcatgggcagagaaaatggatggatgaaatgtcttgcctgaagttggaattggacgggacaaatagtcttgaaaataatgcaaacatcattattgaaaaatggaaaggattaggaagataaagtggatttcagaggctttatcttcctgttatttattatattttttcaccacaatgtggacatttattagaaaaaatcgtatgccaatacatgcgatgcccacagaaatcacaggtatttagtggtgacactaatggcataactaaaatacattgtaataacaataaaaatgtaaatgtcctgtttccccaaggttctgatatgaaaaataccaaaattaaatcgaaaatagaatacacaattcctattctccatgcgaaaattcctatttttcgtaaattccctccgtaaaccatgatggagactagcaaagtatatataaaacatctaaagaaaaatgatatgctcataatggcttctcctaatgcctgacaatttaccagatgattaaaaaatatattccgcatacgtatgtcctaaagaataagtatgactggaatctaagaaaatctacatttgtgcgttcttccaccatgtctgatccaacattttctttatacatcaatcaagggtacttttgccaccgcatttaagtaaactgtacataaattatttgtaaaaggtacaatcaaaatatttctgcatgggtgttgttattaatgaatctttgtgcttttacttttctctgtcgaaagacaatgaaattaataagccctgtctgagacggaattgggggaagctatttttaatctattcaaatagccagcttgaggtaaagttaacggtatacagtacggtgttatcgcgactacaaagatctagggctgcaaggctgtactacaaatttaggaatcagtcagcagacattatcaagaatcggttttatcttgaataacagttaaaaatttgataagatgataaccgtacataattagtatccttgtttcctgtagaaatgatattaagagacaaggaggacaattatatcggtaaaaataaaaaaggaaaagcataggacgtggaatgagtcgacgctggttaacgtctagaaatgcttaaaaataaggaaaaatgattgatactaagtgtttaacaccaatgatgcagcagtatatggagacgaagaaacaatattctgactgtattttattttacagacttggtgacttttatgaaatgttttttgacgatgccattacggcatccaaggaactggaaattacactgaccggaaaaaattgtggattagaggagcgtgcgccgatgtgcggtgttccgtatcactctgtggatagttatctgaaccggcttgtggaaaagggctataaggttgcaatctgtgaacaagtggaagatccgcaacaggcgaagggcattgttaagcgagaagttgtgcgtgttgtaactgcaggcactaatatgaatgcgcaggcactcgatgagacaaagaataattatatcatgtgtattgtatatatcgccgatcgatatggactggcggtggcagatgtgtctaccggggattattttgtgacagaacttgacagtggacggaagcttttggatgagattcataaattttcaccttctgagattatttgcaatgaatccttctatatgagcggacttgatctggacgatttaagacatcgtcttggaatgatgatctattcgatcgatacgcatttctttgatgatgaaatgtgtgcacgtattttaaaagaacattttcatgcagcttcgctggaaggcatgggacttggagattataactgtggtgtgatcgcagcaggagctcttttgaaatatctctatgagactcagaagacatcgctttctcatatcacacatattacaggatatgcgacagggagatatatgttattggacagctcttcccgaagaaacctggaattgtgtgagacgttgcgtgaaaaacaaaaaagaggctctcttttatgggtgctggataagacgaaaacggctatgggcgccagaatgcttagaagttatattgaacagccgctgattgacaggcatgagattgaacagaggctggaggcggtagaagaattaaaagacaaagcgatttctcgtgaggagatccgggaatatttatctccggtctatgatctggaacgtctgatcagccgtgtgacatatcagtctgcgaatccaagagatttgatttctttccgcaattctctggaaatgttgccgcatatcaaatacattttaacagaaatgcacgaagaacttttacagcagatttgtgaagaattggatacgctggaagatctttatcagcttttgaatgaatccatcatggaagaacccccgcttgcgatgaaagaaggcggtattatcaaagatggatatgatgcggatgtggatatgctacgacaggcaaaaacagaaggaaagaactggcttgcacagctggaagaggaagagcgagagaaaactggcattcggaatttgaaagtgaaatataacaaagtatttggatactatttggaagtcacaaacgcttacaaagaactggtaccagattattatacgagaaagcagacacttgccaatgcggagcgtttcatcactccaagattaaaagagttggaagatacaatcctcggtgcagaagataagctgtatgcgcttgaatatactctgtattgtaaagtgcgcgaccgaattgcatctgaagtgcttcgtgtccagaaaacagcgaaggccgtcgcaaaaattgatgtatttacgtctcttgctcttgtggcagagcggaacaattatgtccgaccgaagatcaacgagaaaggactgattgacatcaagggcggcagacacccagttgtggagaaaatgacaccggacaatatgtttatcgcaaatgatacactgctggatgataagaaaaatcgtgtttccatcatcactggtccgaatatggcaggaaaatctacatatatgcgccagtctgcgctgattgttttgatggcacagatcgggtcatttgttccggcagatagtgccaatatcggaatctgtgaccgtatttttacgagagtcggcgcatcagatgaccttgcgtccggacagagtacttttatggttgaaatgaccgaagttgcaaatattcttcgaaatgccacaagcagcagcctgttgatcttagatgaaatcggacggggaacgagtacgtttgacggattgagcatcgcatgggcagttgtagaacatatcagtaataaaaaactacttggagctaaaaccttgtttgcgacacattaccatgaactgacggaactggaaggaaagcttgacagcgtgaacaattattgtattgcagtcaaagagcagggagatgatattgtcttcttgagaaagattgtaaaaggtggtgcggataagagttatgggatccaggttgcaaaacttgcgggggtaccggaatccgtcattgcacgtgcaaaagaaattgtcggagaattaagtgaggcagatattacgacaaaggtgcgtgagatttctgcgcaaggaagcgagacgaaagcacgccagaaaaaatatgatgaagtagatctggcacaaatctcattgtttgatacggtcaaggatgacgatgtattagaagaactaaaagaaattgatgtgtcgaatctgacgccgatggatgctttaaataccatttaccggttgcagaataaattgaagaaccggtggaaatagtcggagaaaggagcagatatgccaaatattcaagtcttagatcaggttacgatcgataagattgcggcgggagaggtgatcgaacgcccggcatcgattgtaaaagaactggtggaaaatgcaattgatgcgaaagccactgccattaccgtggagatcaaagacggcggaatctctctgatccgcattgcagacaatggatgtggaattccaaaggaagaagttccgcttgcctttttaaggcattcgacaagtaaaatacgctctgtggaggacttgactggaattgcttcccttggttttcgcggagaagcgctttcgagcattgcggcgatcgcgcaagtggagcttcgtacaaaggtgaaggaggcagatgcgggcatacagtaccgaattgaaggcggatcagaaaaatcaatggaagaaatcggaatgccagatggaacgactttttttgtccgtcagatttttttcaacacgccggcacggcggaagtttctgaaaactccgatgacagaagcaagccatgtcagtgaattgatcacgcgattggcgctgtctcatccggaaatttcatttcaatttctcacaaacggacagccaaaacttcacacatccggaaatggcaggctgaaggatgttatttaccatatttatggaagggatattaccggaaacctgctcgaaatcaatgcaaaggcaaacggagttgcaatccggggatatattggaaaacctctgatttccagaggaaacagaaattatgaaaattactatatcaacggaagatatgtaaagagcagcataattgcaaaagcaatcgaagatgcctataaggggtttacgatgcagcataagtatccgtttactgtgttacacttcacgatagacggaacagatctggatgtaaatgtccatccaacaaaaatggaagtccgttttagcaaacaacaggaagtgtataattttatttacaatacactgaaggatgctttgagcgaaaaagaattgattccacgggtggaattatcggtggcggaaccggtttcccaaaagagtacgttcttagaaaaagcggtctcgccatctgttccagacgttttaccagataaaaaaaatgaaaaagtttttgtggagaaacttccgcaggaagcgcggtatgcagaagctccttctgaagagaaaaatctagattattttatgaagaagatgcgggaacgtgtcactgcctatcacaatcagagttctcaggcagaagtgaaagaccgaggagggctttatagaaatcaattatccactgataggatcaaagaggctgcggcatatcgggcagaacaaaaaaagcaattcggacagtctgaaaaagtgcaggaaaaaatatatagaaaagaagataaaagggaaaatctacaagaaacgtcacaagaaatcgcacggttgcaaacaccgaaagaggcggaagaggatacacaactaaatttttttgatcaaaagctattgtcaaaagaagcaaaacaggaatatactttagtaggacaagtgtttgaaacatattggattgtagaataccgagatcagatgtatattatcgatcaacatgccgctcatgaacgtgtgctgtatgaacggactttgaaacggatgaaggaaaagcagttcacttcgcagcggatcagtccgccaatcgttctgaatctgtcgatgcaggaggaacagcttttatcagaacatatggaaaattttacaaagattggatttgagatcgagccttttggaggggattcctatgcagtccgtgcagttccagacaatctgttcagtattgcaaaaaaagatctgctgatcgaaatgttagacagcctgtcagacagtatttctacaaatcttgcaccggatattgttctggagaaaattgcttcgatgtcgtgtaaggctgcggtaaaagggaactccaggctttctggcagagaagtggatgcgctgatcggagaacttttagaactggacaacccatatcattgtccacatggaagaccaacgatcattgcgatgacaaaacgtgagctggagaaaaaatttaaaagaatcgtatagcatcttattttgtaaaaatattatagtataggaaacaggggaaggacaaatgataaactttataatcagtgaaaatttttattctttatttgcagggatcggtcttatggcagcatttttgatgacttgtgtctgcattaccaaatttaactatttacttccaaaagatgccggcagagattttgcccatgatggaaagctttctgcaggaaaaccaagaggagccgggatcatttttattcttgtatttgcggcagcggcactactgttctcggaactttctgtcgagatcgtcatttacattgtgcttgtcattgcggagatgctgactggctatctggatgacgcctcagaaaagccgtggaatgagtataagaaagggttactcgatcttttggttgctgtagtgctttcgcttacctttatgcactacaattccagcacgattgaatttgcaattccaggaatctctgtgacaattcctccggttgtattttgtctgctctcgatcgttttgatctgggtgtctatcaacgtgacaaactgctctgatggagtagacggcctttctgctacgttgacgatcatcacgttaatcacactttatattgtaaaaggaatgaaagggacaacagacaacttctcttatttgatcttgctgtttgtaatctgtttgcttgggtatttgtggtacaatgctgctccgagccatctgatgatgggggatgcaggatcccgagcgatgggaatttttattgcaatcgcagcgttaaagacagaaagtccatttttatatattttcgctgcattcgtgctgatcgcagatggaggaatcgggattgtcaaagtagcattgcttcgtttcttgaagatcaagatcttaacaaatgttcggactcccctgcatgatcatgtgcgaaaagtgtgggactggtcgaacacacagactgttttccggtttggaatcattcaaatcgtaatttctgtggcaacaatttacatgcttatgttgtaatcaacaggagtagattatgaggtggctatgatagatacagaaaaaaaaccattgatcatattgaccggtccgactgctgtcggaaaaacgaaggcatcgatcggactggcaaaagcaatcggcggagaaattatctccgctgattctatgcaggtttaccgacatatggatatcggttctgcaaaaattacaaaagaagagatggcggatgtcccacattatctgattgacgttctggaaccggaagaggaatttcatgtggtacggtttcaacagatggcaaaggcggcaatgacagatatttattccagaggcaaaataccaattattgtcggtggaaccggattttacatccaggcacttttatatgacattgatttcactgaaaatgaaggagacagtgtatatcgagagaagctggaggcacttgcaaaggaaaaaggagccgcatatctccatggacaacttgccatggtcgacccgaaatcagcagaagaaatccatgcgaataatataaagcgcgtgatccgtgcactggaattttatcaccagacaggacagaagatttccgaacacaatgagcgggaaagacaaaaagagtctccttatcagttctgttactttgttttaaatgaccgacgagaatgtctatatgaacggattgaccaacgggtggatcagatgatccgaaacggtcttgttcaggaagtacagacgttaaaagagagaggctgtacaaaacagatggtctcgatgcaggggcttggatataaagaaatcttttcgtatctggagggggactgttctcttgaggaggctgtctatattattaagcgggatacaagacacttcgcaaaaagacagctgacttggtttaagagagagcgtgatgtaatctgggttcagaaagatgagttgaattatgatgacgaaaaattattacaaagtttgctagaaagtatcaaagaaaggatgaatcttccatgttagaagaaaaacagacagtggctgctatttatgagacactgggaatttccagagaagtctatgcatttggcagtgaaattgaaaaaacattacaggagcggtttgaagaaattgatcagacagcagaatataatcagttgaaggtggtacaggcgatgcaggaatgcagagtcagtgaagggtgctttaactatgtaagtggatatggatacaatgatcagggaagggatacgctggaggaagtttatgcacatacattccatacagaagcggcgcttgtccgtccgcagattacttgtggaacgcatgcgcttgcattgactttaagtgcaaatctgagaccaggagacgaattgctttcccctgtcgggaaaccatatgatacgctggaagaagtaattggaatccgtccatccaaaggttctcttgcggaatacggagttacataccgccaggtagatctgctctcagatggaacctttgattatccggcaatcaaagctgcaatcaatgagaagacaaaactggtcaccattcagcgctccaaagggtatcagacccgcccgagtttttcagtaaaacagatcggagagctgattgcatttgtcaaggggatcaaaccagatgtaatctgtatggtagataactgttatggagagtttgtggagcggatggaaccaagtgatgtcggcgcggatctgatggtaggatctctgattaaaaatccagggggcggacttgctccgatcggcggatatgttgtcggaaagcaggaatatattgatcagtgtgcgtaccgcttaacttctccgggacttgggaaagaagtaggagcttcccttggagtgatgaaagacttttatcaaggatttttccttgcaccaacagttgtaaaaggtgctttaaagggagctgtgtttgctgccaatatttatgaaaaacttggattttcagttgttccaaatggaagtgagagcagacatgatattatacaagctgtgactcttgggacaccggaaggtgtgatcgcattttgtcagggaattcaggcagctgcccctgtagacagttatgtcacacctgagccatgggcaatgcctggatatgacagtgatgtgatcatggctgccggcgcttttgtgcagggatcttctattgaattgagtgctgacggtccgatcaagccaccatatgcagtttatttccaaggggggcttacatgggaacatgcaaaatttggaattttaatgtcgcttcagaaaatggtagacaaaggtcttgttacactataagaagcatataaggaaaagaaaatctgtctcacaatctggagaaacatctgatttcataaagaatttaggcagatctggggagaggatactatgaagaatgtaattgtagtcggaggaggagcctccgggctgatggctgcaatctcggcagcaaaatcaggagccagtgtctgcattttagaacacaatgagaaattaggaaagaaaattcttgccactgggaatggacggtgtaatttttcaaatcgtctgcaggaaccttcttgttatagaagtagccagagaaattttccatggcaggtgatcgaacagtttccggcagaaaagaccattgctttttttgaagaactcggcatctgtaccagagaccggggcggatacctttatccggggtctgatcaggcagcctctgttttggaagtacttcagatggatgtagagcgactgcagataccggtagaatatggtgtgcagatttgtgggattgtgaagaagaaagaacagtttgaaatccgcaccgccacaaagagataccattgccaaaaactaattcttgccacggggtcaaaagcatctccggtaaccggatctgatggaagtggatatcaatacgcgaaggatctggggcatacgattgctccggtcctccccgcgcttgtggcattgcatgcaaaggaaaatttttttgctgcgttagctggtgttcgcatccaggggaaagtaacacttttcgtagatggaacaaaatgtgcagaagataccggggagcttcaacttaccaaatatggaatttccggcattccggtatttcaagtaagtcgttacgcatcggaaggcctttacagaaaaaaagaggtcattgcagtcttggatctggcaccgaatgtgacagaaaaggagatggacgatatcctcagacttcggatccggaggcatccggaacgcaaaatgacagagtttttcacgggcatgtaccaccagaaattttctcaaactattttaaggcttagcaaaattgataaaaagaaaagctgccaggaactatcagagcgggaaattatgattttatgtcgactgttaaaatcacttcgcattacaatcaagggcacaaatgattttgatcaggcacaaatttgtgcgggcggtgtcaggacagaggaagttgatccaaaaacaatggaatcccattgtgtatcagggttgtattttgcgggagagctcctcgatgtagatgggatttgcggaggatataaccttcagtgggcatggtccagtgggtttgttgcaggaaaatgtgctgcgcaaagcagtataggagaaagggaaaaaagaatatgattcagattagccaattgaaattgccctgcacacatacacagcaggaattgagagaaaagattgagagaacacttcggatccgtcctgaggagctgatagaatattcgattgaaaagcaatcaattgacgcgcgcaaaaaaccacagatattttatgtctatacgattcatgcttccgttttgcaggagaaaaaggtgtttaaaaaagttcacagcaaaaatatcaccatcgtggaaaagaaagtatatcaattcccgtttcatgcggaaagcacaccggcagatcgaccggtgatcatcggaagtggtcctgcaggactgttctgtgcatacatgttggcagaacatggatttgccccaatacttctggagcgcggcaaagcaatagaagagcggaagaaagatgtagattccttttgggagacgggcaaactgaatccagaatccaatgttcagtttggagagggaggcgccggaactttttctgatggtaagctaaatacacttgtcaaagatccttccggaagaaatcggaaagtgttagaaatctttgtaaaagaaggcgcaccggaggaaatcttatatgtaaataaaccacatattgggacagatcttctgatgaatgttgtaaagaatatgcggaagacgatccaaagcaacggcggagaggttcggtttgaaagcaaagtgactgagctttgtataactgacggacagatctgtggcgttgtaataaataaagagcaatttcttcctgcgaaatcggtgatattggcaattggacacagtgcgagagatacctttgagatgctttgggaaaaacagatttgcatggaagcaaaatcatttgctgtcggtgtgcgcgtcgaacatccacagaaattgatcaattatgcacaatatcagatgaaactgcccaaaacacttccagcggcatcttacaaggtgacggcacaactttcaaatggaagaggtgtttattccttctgtatgtgtccaggcggttatgtggtcaatgcttcatcggaagaagggcgacttgcagtaaacggaatgagctaccatagcagagcaggagaaaatgcaaacagtgccattatcgtgaccgtgacaccaaaagactatggcagtgaccatccactagctggaatggagtttcaaagaaaattggaagaaaaggcatttcgtctggcacagggcaaaattcctgtgcagcgctatgaagatttttgcaaaaaccgggcaacagacagttttggaacggttcacccttccatgaaaggaaactatgcgcctgctaatgtcagagaaatcctgccggagattgtggcagcatctatcgaagaaggcatccgttgctttgatcaaaaactacaaggatttgctgacccagatgcactcttatctggcgtggaaagcagaacatcttctccggttagaatttccagggatccttctactatggaaggaagtgtaaaagggttatatccgtgtggagaaggagccggatatgccggtggaatcacttccgccgcaatggatgggattcgtatggcagaagctgtggcaggtcaactcagatagaaagacaaacaatcttcacaaaaaattaatgtcttttctatatacactttttttaaagtatgataaaataaacagagtttgtgagaagaagaggtggagtaaagatgaaaggacacgcagggaaaaacacgtgggcactttttttactgcttttggcaggaattgtgcttggcgggtttataggtatgctggcagagggagtgccggcactgagctggctgtcatatggccagacatttgggtttgacaatccgattgtgctgaatctcggcttattagtcattactttcggcctgaatatcaaaattacaattgcaagtattcttggagttgtgatatctattattatataccgcttattatagcatctttacttgtagcacaagagtctaaagaacacatgaatcaaaattgtaccataagagaaattatatcagaggaacgtccttacgagaaatgtgaacagtatggcgcaggcaatctgaccgatgttgaattgcttgcgattcttctgcgcacagggacaaaaggacacagcgtgctggaactggccagaaagattttgtatccggtttattggcaggatggaattttaaatattcatcactggacgatggaacaactgatgcagatcaaaggaattggaaagattaaagcgattcagattctgtgcctgtcggagcttgcaaagcgtctctcaaaagcagatgcgtaccaaggacttgattttcggactccgtcctccattgctgagtattatatggaggatatgcgtcatcgtacgcaggagcatatgaagcttttgatgttaaatacaaaggcaaagcttctcggtgaaacgacaatctcaaaagggacggtcaacgcgtctttattgactccgcgggaattgttcattgaagctctgcagaaaaatgctgtttctatcatattgcttcataatcacccaagcggggatcccacaccaagccgagaagatcttctgattacaaaaagaattaaagaggcaggaagtctgattggaattgaactgttagaccatattattattgggaacaattgttatatcagctttgccgaacaagaacttatttagagaggaatcgatgtcggttgtctagaaatatatatggtcttgatcttggcagttatgagatcaaagtatatgataaaaaacaaaaaacaatctggcgtgaaaaaaatgcgattgcatttgcggatgaaaaggaaatttttgcagtcggagatgaggcatatgagatgtatgggaaaacacctgatcacatccgcgttgtatttccgatgaaggaaggcgtgatttccggaatcaccgatatgcaatatttattacaaaatcttctaaaacgagggcaccaatttgcttatgggtccgagtatgtgattgctgttccgacagatgtaacggaactggaaaagcgggcattctgtgaccttgtccttcattcaactgcgagagcaaaatcggtgcgaatcgtggcacgcggcattgcagatgcagttggtgccggaattgccgtggagcgagaaccagggatttttttagttaattttggggcatctacgatggaattgtctgtgctttcctatggaggaatcgtattgaaccgcctgcttaagattggtggaatgcatttagaccgtgagatcatccagctggttaaaaatcggtaccaaatattaatctccgggcgaaccgcagaatttcttcgaaaagaagcaggattatttccaaacaggcaggaatctatttatcaagttccgtgcaaaaaattaggaaccggccttccaaagtacaaggagattcccggaacgttagtgaaaacggcacttcgggagcctctgtcagactgtgtgaaggaaatgacggcgcttttaaaaagaactcctccggaagtgcggcaggcaattgagcaaaaaggaatctttctgaccggtggtatggcatcgttttcaggtcttgacagatatttatcgcatgccggcggatggaaagtgactgtggcaaatcagcctgcaatttgtgcagtgagaggccttgaaaaaatcatacacaataaaaatcttcacaaactgacttatgaaatgtcagtggaaaatgacaggtggatacgatgagaaagaaaaaacaaaatggtctggcaagtaaatactggcttttaatcctttcagcggtatgtctgcttttgatgggaatttctctgatttctgataaaatcaacggacctttgcggatttttgccaattatacggttgttccgatgcagaaaggaatcaatcaaataggaatgtttttaacagatattacagataattttgagacattgcagctgacaagaaaggaaaaagaagcacttcaggaaaaggtagatgaactgacgttggaaaacaagatgctccaacaagaaaaatacgagttagaacgtcttcaggaactgtataaattagattctaattatgcagattatgagaaagtgggagctcatgtgatcgggaaggatccgggtaactggtttagtacctttaccatcgacaaaggaagtgatgatggactcgcagtggatatgaatgtaattgcaggatctggattggttggtattatcacagaagtagccccaggatggtctcgtgtccgttccattattgatgattccagcaatatcagtgccatgacactttcgacactggatacttgtattgtcaaaggtgatttgaagttgatgaatgatggcaagatcaagtttgaacaattagaaaataataagaatgagattgcggtcggagaggaaattgtgacttctcatatcagtgacaaatatctccagggaattacaattggtgttgtcagtgatattaaggtagattccaataatctgacacgatccggttatctcactccggttgtagatttcaagcatcttcatgaagtgcttgtcattactactttaaaagaagatgtaacgaaagagataaaagaagcaaagtaaggagtggagaactgatgaaacgaaaaatagtaaccggatgtctgatcttcttttgtttcctgcttcagacaaccatttttcagacacttgcacttgcttccatcgcaccgaacttaatgatcattcttacagcttcattcggatttatgcgagggaaaaagtcgggaatgtttgttggatttttctgtggattgttcatggatgttttttcaggaaatctgattggattttatgcactgctctatatggtgatcggatatctcaacggattttttcgacgattattttatgcagaagatattaaacttccactgatcttgatttccggaagtgaatttgtctatgggatgttaatctatcttctcctgtttttacttcgaagccgatttgatttcccttattatctcggaaatgtcattttgcctgagttgatctatactatacttgtaacattaatattgtatccgatcattctgaccttgaatcgaagattggaagcagaagaaaaaaggagtgctggaaaatttgtttaatcgtatcaaagaatggatcatggaaattataaaatctcgtctgttcgtaacagtgattgccttttgtgttctgtttgcaattttgatccaaagagttttttatctgcagattgtaaaaggacagtattatctggataattataaacttcagattcggaaaacaagagaagttcccgggacaagaggaaacatttatgaccggaatggagaattgctcgcctacaatgaattggcatattctgttacgattgaggacaacggcgattactcttccatgacactcaaagaaaaaaataaaattataaatgaaacggtcgaagaagtgattgacattgtagagtcaaacggtgataccgttatcagtgattttggaatcattttaaatgcttcaggaaattatgaatttgcggcacaaaatgagacgtccaagcttaggttccttgcggatatttatggttatcagacaattgatgaactgacagacaaagaggaaaatgccagtgccaatgacattataaattatctatgtgaagatgagcgttatggatatggaatcgatcaatcttccatggaaaagtctcgtattttaaaaatggtcaacatccgttatgccatcagtctcaacagtttccagaaatacattccgacaaccatcgcatcgaatgtcagcgatgagacggtagctgaaattatggaaaactctgacagactgcaaggagtcaatattgcagaggattctctcagacgttatacggacagtaaatattttgcttcattgatcggatataccggtaagatttcccaagaagaatacaatgagaaaaaggaaagctccaaagaatatacattgactgatattgttggaaaatccggattagaacagaccatggatgaagaactgcaagggacaaaaggaaaagaaattgtctatgtggacagtgtcgggaatgtaattgagacagagaaaaaaactgatgccgttgccgggaacgatctctatctgacaattgataaaaatcttcaagaggcaacctatcagatcattgaagaaaaacttgctggaattctcgtgtcacgcattcaaaatatcatgaattatgatccggcttccgcaggagactccagcaagatcatcataccgattgatgatgtttatcatgcgctatttgcaaatgaagtgatcgacacaaaacatttttcatcgacagatgcaaaagagacagaaaaaaaggtggaagctcttgtcacggaaaagaaagcttcctgcattgcggaagttatgtcccaactccgggatccagcggctgcttcttacaaatcactttccaaagaaatgcaggcatatatgaattatattgcagacgatcttctgatggaccaggcaggaatcctatcttccgatgcgatagatacaagcgataaaacctatatcgcatggacaaaagatgaaaccatcagcctttacgaatatctgaactatgcgatatccaaaaactggataaatctttcagagattccgcaggcagaaactgagcaggagaaatattcggatctcaatgaaatttacgggcagattttaacttacctcgagcaaacgcttccgtcggacagcacattcgaaaagcttgtttatcgctatatgatcaaagcgaatgaactgaagggcaaagatatttgcagaattttatacgaacagaatgtaattgcctttgacgaagggcaatatcagggactggaaagcggtcagattgacccatatagttttcttgtcgggaaaatcagttctcttgaaattacaccagcccaacttgcactggaaccttgttccggttctgcagttgtgaccgatgtaaataccggggaggtgcttgcatgtgtatcctatccgggctatgataataataggctggccaatacaatggattctgcttactataataagcttgcaaatgatctctccagtcctttttataatactgctactcaggagcggactgcaccgggatctacgtataaaatgttgacatccgttgcagctttgacagaaggaatcattacaccatctgatggagttgtatgtgaaggaatatttgagaaagtatttccaaatccaaagtgctggatttcgccgggagctcatggttggcttgacgtcacaggcgctcttcagcactcttgtaatattttctattatgaaatgggatatgagttgggagtgacagaatcaggggataaaaagggagaggatggaaagcctgcgaaaacgtattccagtgatctcggtattgagaaactgacaaaatatgcagagatgtttgggttaaatgaaaagtccggattagaaatttcagaatcgaaacctcagatttccgatacagactccgtactttctgctattggtcagggaacaaacaactatacgacaagccagctcgcacgctatgtgacagctgttgcaaaccgtggaaaagtctttcagctttcccttctcgacaagactgtggataaaaaaggaaatgttgtaaaagactatcaaccggaactgagaaatgaaattaccgaagtttcagacagcacctggaatgcagtgcaacagggaatggaagatatggtatcaacaactggaacatttgattctctccgcctggaaggttttcagatggcaggcaagaccggtacggctcagcagagtgagacccatccggatcatgcactgtttgtcggctatgccccaagcgaaaatccggaaattgccgtgagcgtaagaattgccaatggctataattctagttacacagcagaaattggaagagatattgtaaaatataaatatcatcttggagatacggaagatatcgtcacaggaagcgccagcatgcttggtgttgccggtgccggagattaaaatacaaaagacaaaaaagaaatgaaatggaggaattttgtatgggtgaagtaattgtaatcacatctggcaaaggcggtgtcggaaagacaacaacaacggctaatatcggagtcggacttgcacagatggggaaaaaagtgattgtgatcgatactgacttaggacttcgcaatctcgatgttgtgctaggtcttgaaaatcggattgtttacaatctggtcgatgtcattacgggaagctgcaggctaaaacaggcgctgatcaaggacaagcgctatccggaattatacttgcttccatcggcacagacaaaagataagtcagcggtaactccggaacagatgaaaaagctgacagcagaactaaaagaattgtttgattatgttatcctcgactgtccggcaggaattgaacaaggatttcaaaatgcaatcgcgggagcggaccgtgcagttgtcgtcacaacaccagaagtctctgcaatccgtgatgcagatcgaatcattggtcttttggagcaaggaggaattgcccagtccgagctgatcatcaatcgacttagaatggatatggtaaaaagaggagagatgatgtccgtggaagatgtgacagaaatccttggaatacgcctgatcggtgtcattcctgatgatgaacaagttgtaatcggtacaaatcagggagagcctgtcattagtctaagttccaaagcaggcgcggcatataaaaatatttgtaaaaggctgactggagaagaagtccctttcttaaattttgaaaagcaggatggattgttttcaagactgacaaaagtattcaaaaagtaacagggagggaatcagatgcagaaatttggatggaaaaagaaacgtacttcggtaacgattgcaaaagaacgactgcggttgatcttgtcgtctgaccgcgtaaacagtaccccggaatatatggaacggatcgcagaggaattatttctgaccgtctcaaaatatatcgaaattacacccgaaaactttactgttcaaattacacaatctgatatacatattcaattagcaggagagaaaaagtgaaatttttaaaacgatatcatttgaaaaattttaacttcatactggtgacttttgtcacagcactttcgattatcggaatcatggccgttggaagtgcacagaaatctatgcaaggcaaacagatcttcggagtgatttttggtctgcttgtaatgcttttgttttctgtcatcgactacaaatggatcttgcggttttactggattttgtatgctgtcaatctgattctacttctgcttgttcatttttttggagcagaggcaaacaacgcagtcaggtggcttgattttggatttatccggtttcagccttctgatccaacaaagattctgatgattttattctttgctcaatttttaacgaaacatagaaaaaaattaaatcatccagtcatgatcatggaagcgattgctttgatcattccctctttgtatttgatttacaagcagcctaacttgtctaccaccatttgccttgcagcactgttttgtgtcctcttgtatctgggaggccttagctataagtttatcggcactgtgttggcggttgtgattccagtctgtctgatctttttaagtcttgttgtacattccaatgtaccgttcttaaaagactatcaacggcagagaatccttgcatggctggaaccgcagaaatatgcttcttccacagcatatcaacagatgaattctattatggcaatcgggtctgggcaactgaaagggaaggggtatgacaacaatacaacaacatctgtgaaaaacggaaatttcatttcagagcctcagacagattttatcttcgcaattattggggaagaacttggatttattggatgctgtattgtaattattttattattgttaattattgtccaatgtattataatcggattaagagcgcaggatcttgcaggacagatcatctgcgggggggtagccgcactgataggaatacagagttttatcaacatcagtgtggcgaccggaatttttccgaacacaggtatttcattgccttttgtaagctatggactttcttccatagtcagcctgttcagcggaataggggttgtattaaatgtaggattacaaccgaaaaaataccaataggagagtgagcacacgatgagaataggattaatagcacatgatgctaagaagatgttaatgcagaatttctgtattgcatacagaggaattttaagtaaacatgaattatatgcaacaggaacaacaggacgcctgatcgaggaagtgaccaacctttccattcataaatatctggcaggtccacttggaggttctcagcagatgggagcacagatcgatcagaatcaaatagatgcagtgattttcctaagggatcctcttgctccaaaatccaatgagccaaatgtcaatgatgttgtgcgcctctgtgatatgcataacattccaatggcgaccaatgtagcaactgcagaagtattaatcttagcgatcgacagaggagatttagagtggcgtgagatgtacagatagaagaaagagatttttctttggaagttttcttttgattggtatgtttctcatagcaggatgcgcaaaaaaagaatccatcattgccatctatgagaaatcagaatacaatcgggatttatatcgtgcagatttgtatgcagaaaatctctgtgtggcggtggaaaatatcgaacttccaggttatacgacagaccagcaattacatgctgccggactgtttggtgtaaatcaggaacaggtgctctatgcacagaatcttcataacaaactttatccggcaagcacaacaaaggtactgactgcttatgttgctttgaaatatggaaatctgtcagatattgtgactgtgagccgacgtgcagtgacctttgatgtggatgcctctgtctgtggactgcaagaaaatgaccagattacgatggaagcactcctctatggattattacttcattccggaaatgataatgccattgcaattgcagagcatatttctggcagtgtggaagcttttgtagagttaatgaatgaagaggcgagaaaactcggcgcaacaaacacacactttacaaatccacatggattgcatgaagcagatcattatactacagcatatgatctgtatttgatttttaatgaatgtatgaaaaatgagacatttttgacgatgatttcacggtcatcctatgctgcaacagtacagaatcctacttctggaacaagacagctgacatggacaccgtcccatttttatgcgcaaggtctcgcaattcctccacagaatgcagtgattgtaggtggaaagacaggaacagaagatttggcaggatcctgcctgattcttttagaaaaggacctttcaggaaatccttatatttctattgtaatgggagcacctgacaaaacggttctttataatgatatgacttcgctgatttcagcgattccggcttcttagtgtgccgctgcatgtctgatgcggcagcacactttttaaaatttaaatatacacagttacatgtacaaatattccatgtgctgttaagactctgagatctcgttgattcgtccaaagagactgatcaaataaaggccacaaagaccgatgactgtgtagatgatacgtgacagccacgacaaatcccctaacagaaaagcaacgaggtcgaatttaaaaataccaacaagcaaccagttaacagcacctatgattacaagtgtcaatgctgtattatcaaaccatttcatgtgaattcctccttttttaagataataatagaattgccatgaaatgagaatttatacgttaaaggaaaaactatggaaacacaaagttactataataaatattctgaatacttaaagaaaaaatatggaacaaaggtttataaacttcccatcaatcttccaatcacttgtccaaacaggattaatggcggtggatgcacattctgtgcggaaatcggcaccggatttgaaagcctttccaatcaaaaaactgtcacacagcagttgaacgaaaataaagcatttatttctaaaaagtataaggcagagaaatttattgcctattttcaaaattatacaaatacctttatgccgctttctgattttcaaaattgtatgaaagaagctggcagccaaagggatattatagaaatttctatttctacaaggccggactgtatccgtaaagattatatggaagtattgaaacagatcaaggaaacttattctgtggaaattacgttggaattaggattgcagacggtcaattatcatacattggatgacattcagagaggtcatggtcttgcggaatatttagatgcggtccgctgtattcagatgtatgattttacaatctgcacccatgtgattttaaatcttccgggagatacgcgaagagatgctattgaaactgcaaaaatcttatctgcccttcgcataccgattgtaaagattcattctctttatattgcaaaaaatactttgttgtgcaatgcgtatgaaaatggtacaatagcggtgtgctcaaaagaagaatacttacagagacttgctgatttcttagaatatctttcacctgacattgtagtagaaagactgttcagcagggttccggaagaagatgctgtattttccaactggggaactagctggtggaagcttcaggaagaatttgagcaggaaatgcagagacgaaacagcagacagggcatacgatgcagctacctaaatggtgctgcacttcagaaattatagtaggaggtcatatttttggcacaacaagacaagtttatcgatttaaacgcatacaaaacaaaaaagaaaattcctttcaatgtcggaatcatcatttttggaatcattttcttttatctgattgttacaattattctgtacctaacttcccctcatattacttcctatgaagtaagagaaggaagcattttgaatgattatgaatatacagggcttgcgattcgtgaagaaatgatcgtggagtctgaaggagacggctatatcaattattatacttctgaagggagtaaggtatccgcagcttccaatgtatatacattgagcaatgaaaagatggaacacacagaggtatctggagataccgcagctgtggaactctctgaaggagatctgaaccagattgtattaaagacacagaaatttaatgaaacatttcaggacgaacagtttcataacacttacaatctccgcacaaatatcgacagtgtgatgcttggaatccaaaatcaaactcgcatcaacgaattggattccattatcgcttccggaaattctgccggattaagattatgcgcatcaccaagagacggtattatcatatactctgtagatgggctggaaggcattacaaaagatacgcttacatcagatttactcaacaaaacagattatcagaagacagaactgctgaacaatcaaaagattactgcgggttctcctgcctataagcttgtgacaagtgagaaatggtctgtggccatcgaaatagataaagagttctcagcagaactctctgagatgaactctgtcaaagttcgttttctaaaggacgatgaatatctgtgggccaatgtcagtgtcgtaagtaaggatgaccattattatggtattctttcctttaacaattcgatggtgcgttatgcagaagagcgttatctggatcttgaattgattctggaagatgaaaccggattgaagattcctaaaacggctaaagtagaaaaggagttctttttggtgccggaggaatatgtaaccgtcggcggcaacagcaaagaagcaggtgtcatcaggaaaaaacgcaatggatctacagaatttgtaaaagcaactgtctatgcacaaaaagatggaaaaagctatattgcctctaaagaattgaaaaagggagatacactgctgtgtgaggacagcaatgatacaatggcgttgaacgaaaaaggaactttagaaggggtttacaatattaatcgtggatatgctgtctttcggcaaattaatattcttgcagaaagtgaagaatattatattgtagaagaaaatacgtcgtatgggctgacaaattatgatcgcattgcgctggatggcaaaggaataaaagaggacgaagttgtgttccggtaagccccggagcacattcgtaataaatcaaatgataaaacagcaaaagacgaggagtgaagaatatgctggaaaaaaatttgaaatctatacaggacaaggtgaaagatgcctgcaaaagaagtggtagacatccggaagatgttacattgattgcagtgagcaaaacgaagccggtttcgatgctgcaggaaatttatgaccttggtatccggcagttcggcgagaacaaagtacaggaactcactgacaaatatgaaaaacttccaaaagatatttcatggcatatgatcggccatcttcaaagaaataaagttaagtatctgattggaaaaacaacactgattcattccgttgattctcttagacttgcagaagcaatcgaggcagaagcagcaaaaaagaactgtttggtggatgtcttgattgaagttaatgtcgccggtgaagagagcaagtttggcatttcgccagaagaagtgcttccattggtcgaacaaatcgcccgttttcgtcatataaagattaaaggcttgatgacgattgctccatttgtcgaaaatccagaagaaaatcgtatacattttgccaatttaagaaaattatctgttgacattgcggcaaaaaacattgataatgttagtatgcgtattctttcaatgggtatgacaaatgactatgaagtcgcgatagaagaaggtgccaccatggttcgtgtcggcactggtatttttggtgaaagaaactataatataacaaacgaatgataggagtgtaactatgggagtatttgacaagtttttggacattatgaaactgagtgacgaagatgattatgaggatgatttcttcgatgatgaagtagatgaatatccggaaaagacaagcaaaaatccatttaaaaaagaaaaagaagagtatgatgattttgatatgcaggaaaagtcaaaaagcacttcaaaatctacaaataaagtaactccaatgcgtccgagtggacagagaagagcgccaggaatggaggtatgtgtaattcgtccgacatctgttgatgatgcacgcgcaattacagaatctcttttaagcggacgtactgttatcctgaatttagagggacttgatctggaggttgcacagagaattatcgactttatttccggtgcagcatttgcgatcaatggaaatcttcagaagatatctacttacatcttcctcgtaacacctaccaatgtagatatttccggagatttacaggatttgctgaatacttcttttgacatgccgtccatcaacacaagattctaggagtactatgcaaaaagaagaagaattattaagaaaaagactgattgagttatcaaagattgcatatcatcgcaattttattacttacacagattttctaaatcttaatgaactgaatattttacatacgttgccaaaagatactctgtacactccgtacagaacttttggcggctatgcttcttcagagcgtcagattgcagcatttcttcctgatgctctttgtttacgttcagagatagaagatcttgcatatccgatgggaattatacatatcctgccgcgcagtcaaaagttctccgagcagctatctcacagagattatttgggagcacttctgagtcttggaattgagcgttcaaaaatcggagatattatcgtagaagagcaaggtgcgtttgtatttgtctcagacaaacttttatcctatgtgtgtaaagaaatgacacagatacgtcggactcaggtgattgtttgtgaagaatctttttctgagtttcactatacacaaaagtatgaaaaaattacaggtacagtagcttctgtaagactggatacccttctttctcttgcattttcatcttccagaagccgcctcagtccattgatcgaggctggaaaggtgtttgtcaatggtaaacttatttcatctaatggatataatgtgaaagaagatgatgtgatctctgttcgcggctatggtaagttcatctatcgaaaagtaatttcccagacaaaaaaggggaggcttctcgtggaaattcacaaattgatttaaaggagaaacgatagaatatgaaaaagaaacgatttctatggtatttaggtggtttagttgcactggtttttggaattgtacttgaccagtggacaaagtttcttgcgaccacatacctgaagggaaaagaagatattgttctgatcaaaaatgtattttgtctgcattatctggaaaatagaggagcggcattcggaatttttcaaggacagaaaacattttttattattaccaccttgctgttactttccgcagcactttacttttatatccgattgccgtatacaaagcgttttgctgcgtttcgcatctgcacggttcttgtggcggctggtggaataggaaatatgatcgatagactctgcaacaattatgtgacagattttttctattttgaattgattgattttccagttttcaatgtcgcagatatttatgtagttttggcaatgtgtctgttctgctatctggcgtttttctattttaaagaggaagattatcaatattttaccttccgtgggaaaaagtcagtgcaggatccagaagaacaggagtaaattatggaagaaagacgatataccgcagagagaaatgatctgatgcgaattgataaatttttatccgaaaagcttccagatctttctcgctcttatctccaaaagctgatcaaagaaaaagaagttcttgtaaatgggcaaccggtaaaagcaaactataagctttctttggaagatcatatttcagtgacgattccagaattgaaagaacctgatattcttccagaacagattacacttgatattctctatgaagatgaagatatccttgttgtgaataaaccaaaaggaatggtcgttcatccttctgcaggacattatagtggaactttagtcaatgcactgatgtttcattgcaaagatcaactctctgggatcaatggcgtaatgcgcccgggaattgtgcatcgtattgacatggatacaactggttctctggttgtctgcaaaaatgattttgcacatcagtcgctggctgagcagttaaaagaccatacgattacacggaaatatcatgcgattgttcacggagtgttaaaggaggacaatggtactattgatgctcccatcggcagacatcctgttgagcgaaagaaaatgagtgtaaactataaaaatggaaagcatgctgtcacgcactatcgggtattaaagcgttttgaaaaatttacgtatgtagaatgtcagttggagacgggaagaacacaccagattcgggtacatatggcaagtattcgtcatcctcttcttggagatgctgtctatggtccggcaaaatctccaatgaagcttcaagggcagacacttcatgcaaaaattctcggcattatccacccacgtaccagtcagtatatggaatttaatgcagaattgccagattatttcaaacacctgctggaaattttgtaaagttgtgtacatttcatcagatttgatgtataatatgttatatatcaaatctgattctcagatggatttacataaaggagcgtgacagttatgacaaaagcaaacacaattattacaatcggaagacagtttggaagcggtggacatgaaatcggtacaaagcttgcagagtattacggaattaaactgtatgacaaagagatgctcgcagttgcagcaaaagagagcggtatctgcaaagaactctttgaatcacaagatgaaaagcctacaaatagcttcctctactccttggtgatggatacttactctatgggctatcctgccggtggatattcggatatgccgctgaatcataaagtttttcttgctcagtttgacgcaattaaaaaaattgcagatgaaggaccttgtgtgttggtcggacgctgtgcagactatgcattggaagagtatgataattgtgtgaatgtgtttattcatgcagatttgaatgcccggattaggcgtgtcgcaagactttatgatctgacagatgcaaaggcgaaagacatgatcttaaaaacagataagaaacgtgcaaactattataattactattctaataaaaaatggtctgatgtagacagctatgatttatgtatttccagttccgatcttggagtggacggcgctgttgaaataatcaaatcttatattgcagcaaaagaagcattgacgaaagctcctcagttatagcagagccatctgatcttagttgattgaaaaagaggcaggacttgtacaacacaagattctgcctctttctattttatatacgtttattcagatgaaaattaacgtttttgtaatattctttccggccatccattgatctttccgtttaaaattgcagtaaacatacgctcttttgctcctgtatgttcttgatttaactgccttacaagttctttggcatattgcctctttgtatgtccatctaccggacacttacttttgactacaggaagatcatatttattcttaaatccaatcacatccatctcgtcgacaaacatcattggtcgaatcacagtcagatccatccggtcaagataagtctttggagagaatgaatgaaaacgtccttcaaaaataagggagagtagcatagtttcaataatgtcatctttatgatgtgcatatgcaactttattgcatcccatatctttgacagcatcgtttaaggcaccttttcgcatctttgcacagagagaacatgggtttgattcttttcgttcctcaaaaaggatgtgagcaatatccgtccggacaatcttataaggtacctcaagctgggcacaaagtttttcgattggctccagatgaaattcctcatatccgagatctacagtaattgcactcaattcaaattttttaggataaaatcgtttcaatccatgaagtgcatagaggagtgtcagactgtctttccctccggagataccaactgcaatatggtctccctcttcaatcatttgatactcatccacggcttttctcgtataacttagcagctgctgtaatttcatatgtatattcctttctcgttattctctatcgattcattcaatatcttatctgatttcctttttcctgacaagagaaaacttgattattttaaaaaaagaagctaatataaaaggaaatagtcataaaaattggagggaaaaatatatgaaatttatagtacagcgtgtattagaatcatctgtttctgttgatggagaaacaattggaaaaattggaaaaggatatatggtgttgattggtgtcggcaatgaagatacaaaagagattgcagataaaatgatcaaaaaaatggttggtcttcggatttttgaggatgagaacggtaagacaaatctttctcttgcagatgtaaaaggatcccttttgctgatttctcagtttacactctatgccaactgccggaaaggaaaccgtccaagttttattgaagccggagcaccggacaaagcagagcagttgtatgaatatattatttcagaatgccagaaacaagtcccgatagtagaacgaggaaaatttggcgctgatatgaaagttcagctaatcaatgatggaccatttacaatcatacttgattcagaaaaattataaagcagaagaggaacacagggcattgcaccgttattgatatagtaactgtggcgatgcccattgctttcctaagtggttcagcaaaaggagagtgggtctctctataactgtagagtactattcttcccgcaattttactgcagaagctgcttgtctgcgcctgctttcatcgattgctgcataatgtttctttgttgtattgacatctttatgccctagaacatcagctacgagataaatatcaccggtttctttatataaagaggtaccgtaagtgcttcgaagtttatgaggtgtaatctttttatttggtgtcacttgctttgcatattttttgaccatattttccactgcctgtacccccattcgctttcgctgggtagagaggaagagggcattttcataatctggcaggggagtaatattttttcttgtcagttccaggtaatctctaagagctttttcgacttcccttccaaaatagacaaccatttcgtttccaccttttcttgtaactttgaccccattatttttgaaatcaacatcattgatatccagcccaacacattctgaaacacggattcctgttccgagcaggagagtaatgatcgctagatcccgatattttgttttttcataataaactttcttttgtcctgtcagctgacttccgcatgtttctatataatcaagcagaattgcgacttcatcagtatccaaacgtatgatcgctttttcgtggagttttggcatgtctacgagcaatgtcggatttttctcaattgcctgtcgtttaaagaaatatccgtagaagcttctgagtgcagacatttttcttgcaagcccttgttcgctgtttgtgatctgtttgttttcagaagattcgtatactttcagatattctaaatattcttcaatatctactgaacttaactgatcgagatcttcaagggtgaattgtgttgtggagcgatcgcgatacagaggattgcattccaccaaaaagtagaaaaatgttcggatgtcataagcataagaaattcttgtttttgcagaagttgttggctccattgcgcgaaaataatcctttgcaaaggcaggaagtgttgtcagaatttccctcagccgtaaagtatcttcaataaaagtctgttcgtgataagtttttatatcttttgccatagaaaagtacctccttaaaatagttacgaattaacctgattttgtaggtaattatagcataagtagactttttagtctatatcttttggaaaaatcggtatttgtcgtatagattaacttctcttttagaaaggcagttttctgcctttcaatggatttttattgttttaaaaagaatctcgctcacattacttccggtacagaatcataataaatgattaatagataatctcccgcacataaatcattcagccacatcccatttaatttctttacttccttaatgtatctggcaattgtctttctgtcagaatcttttgcataagtgtctgcaagactctgtaaagtgtcacctttctgaatctgaatacttttataatacttcccaacaacaggttcttcagatgcatttccatgtgcattggtaaacaaaatgctgccaactgcgctgatataaaatgctgctaaaattgaaaaaagagaaacaatacatctccttctcatcgctcgttgtttcctgatcttcactgcatatgctctgtgcttactcatctctcccacttcctctttctgaaatcatagcgctgtctattcgctttttcgaacaaatgttgcgaacaaatgttctttatgcagattatataacacgaacaaatgtttgtcaataaggtgaacatactttctaaacatttgtttgctttttcctttttcatatgataaaataattgcagaatacaaaagggaggcttttttatgccactaggaaagatcagtaaaaaacaagaagaaattttagagtatattaaatcggaattattatcgaaaggatatccaccggcagtccgtgagatctgcgaagcagtccatttgaaatctacctcttctgttcactctcatctggagacattggagaaaaatggttatattcgccgagacccaacaaaaccgcgtgcaatcgagatcatggatgatacgtttaatcttacacgaagagaagtcgtgaatgtgcctgttatcggtcgtgttgctgccggagcaccaattcttgcagaagagaatattgaaaattattttccaatcccgatggaatttatgccaaatgaaaaaacattccttctttctgtcaaaggagaaagtatgatcaatgcgggaattttagatggagattatgtacttattaaacagcagtcaaatgctgagaatggagatatggttgttgcactcgttgaggatggcgcaacggtaaagcgattttttaaagaagaaggcgtttatcgacttcagccggagaatgattttatggatccgatcattgtagaaagtgtagaaattctcggaaaagtaatcggtgtattccggtttatgaaataatgtaaaatacttctgtcacacattttgatggggaagaataaaaccactttcggatttatccttccccattcctatcaattttttgttcttacatctgtcagcctattgtgcctacacaatttatttatccggacataactgtccaaggtaggcaagacttggctttacttgtcttttcattccatgttttctgtctacctgtatcagcccaaatgtcattgtgtatcctctatgccattcaaaattatctaaaagactccaatagaaatatcctttcaccggaatatcgtcggcaatgcaggaagcaacaccgtcagttgctttttcgataaaagcaatccgtcgtgtatcatctgctgtggcaatcccattttccgtcacatataaatcaccatgaaattgtttagaaaccgctcgaatcacatgttctaatgcctctggatagtattcataattcatttgtgtcagctcagcatgttccggcgctggaacgattccgtcagcccctattcttgaacggctgtaattttgtaccccaaggaaattatcttgttcgatataaggaagataatgcgtaaattccttctcccactctgtttttgcacgctcttctcctcctggttgtggctggatatcatgaagcgaaagcgttaaccctgtcttcgtctccggataaagttctttaatgatatgtaccgccttctgatgcgccttcatgacaatgaaatctccctgttctgtacggctgctgcaaaatgtctgaggggttgcagtataaaagactctttcattttcttcagctccaaggcgttcgttttcttccattttttcagaatccattcctaactgcacctgctgcccttcttctttccttcggctggcatttgctttttcctgtctcttttgccgttccataatagctgcgatttgaagccccatatttgcctcgttgatcgtacagacatacttaatctcattgccaagctttttcatcacatattcgacatactccgcaaaatattgtataacatcctctgactcccaaccacctttttggatcacccaaagcgggctggaaaaatgatgaagagtaacgaaaggttccagtcccttttccctacagcagcgaataacattgcggtaatgttcaatctctgtttccacgaatttcccttgttccggctcaatgcgcgcccattcaatactaaaccgataggcattcaatccagcatctgccatatattctatgtcttcttgataccgattgtaatggtcaaccgcatctaaacttggttcttgaaaaatagaatatttcaactgctcctgtgcccagcaatcgctgtaaatgttatttccctctacttgatgtgcagccgtcgcagcaccgacaaaaaatcctttttgaaattttcccataagaagtcctcctgatcatttgcttttctatgtccttattatatcatgcgtattgtacagtgtcttcattatatgatatccatctaagaaaacagatcgattgtcattacaatagtaattatgatattgttgattctcttaaaaattgcatctgtccatattcctattaaaatattttttggtcatttagatttctttttcattttgagagaaaaactataactccaaataggaatatgcagtctgcccatttgttcgataaacaatgaattgtccatattatcatcaaaagtaaatattcttttttcgtctatgtaaacccgaaaagctccgctctttttatacacaccctttgtgatatctgcaaaataatactttcttacgcggccaaatgtagaacgatacgtaatttccatatcgtttacttctactttccataagccgatattaaaagctgcaatcgccatcactatagaaacaagcagcagaaacaggatcgcccataaagcttcctctataacaatactataaatcaataaacctgtactgcatattgcaaaaaaagcaaacagccaactcagatagatttccgaacggataacataatgagacaacggttctcttccaatttggacttgatttctggcttttttcatgagattcctttctcctgtaggttttaaagttacttttttaatcgtctaattgaattccacaagctccaacccggtttccagttggaatccttctgcccactctttatcacgataaaaaacaatcccttcctgatatccgtcgctggtaaagaataactgtttttcatttccatatcctttaataatcttattcaattcatttgcaacatttacatcaaaccagtcatcatacacttctgcttccaatgtaaattgccggtgtttccattcaaaactaactgttctttttccggttccttcttcccagtttacctggcgggtgtcctcctgtatatttttgaaatcaagttcttcttcatccagtgacgaaacacctatcagaaagtcggtatacattttctctacattgaagaattccacatcaaaggtgtacacaccgtttgcataaggagtccatgtcatgttttcgtaatcgtactccccctgccccagtacagtcagcagtgtcgcagctttatttaattccacttccggcggcattgctctatagtcctgttccagatcgtctatcatttgatcagtcgttccctttatatcatatttatcaaaaatttcagcaagctctttataagtcttttgcatagcttctcctcctaatgaattactttttagactgtatccatttaaggacagcaatgcagatacaactaatgtcaaaatccttttcataatcatagattacctttctttttatcacatctactttccttatagcagaccttttggccagttttccagattttcaaaattatcaaatcttcaagtaatcgtaaaaattttttactattaaatatagtatcattttgctgcttattttttacttcatcgctaaaacttcatgttgtagtcatcctcattcctacatatgataaataataatgttacagcctttctttgtttataatttatagtagtattatatattgttaggtgatttttgtatatatttttcaaaaacacgaggcaaaaaataaaaactaatagaggatattatcccctaatctcatcaatgatattttctcttcccatcttccaagccgggaacattactgttgccaccgcaatcacaacattcaataccataattccaatcaaaaccagatttggaatattggaagttaaaaaacaaccgcttttcttctgctagtttttcttctctgctcttaattttacgttgctttttatattgttcgcgctgtagatttagagcctgctgagattttgttccgatccccttggcagacatttgcttatgaatttctttctgacgtttcttcggatttttaacttcttctttcacaacagtttctattgccggactaaaatgtaagctgttatagtattttaaaacatactcataaatctcacagtcctttggttcagctccaaatgttactttagaaaccgaaagttttccgtcttcaatttgctcaaaaacgcctacccaaaatggttcttcaaaaaatactgtcagtttccctatccttgtactcatgacaatccctccttaatgattgaaataagcaaaaaatggacaacccggaggggaaggttacttaccctgataaacaggacggctgggctacctaccagctctggcatatatcactacatgcattgcgtttttatctttgcttttatatcgtagttctaattataaagaaatcagtccactctgtaaatatacacgtcgcttttattttccatcgtagtattcattcagaattctcgctaattcttttggattttcttcgtttacaacatgtcctgttttttctatcatacacaatgccacattttctatattttctgaaagagaccttttcagatttcctgctcaataaaactatgaaaatttaatttccttattttaaaacataattacaattcctattcgacaagaacgattatcatagaacgattgtatttgtccccactcataatgatattcgacgcctgacatactctttttactgggaatgcctaagcatttccttaaaaacctattattttcttcttgcaacttttctaagactgtatcattcattgtctcatatttcgtagaatactttttgtctgctcgaaccaattcaatcttttttacttttccatgtcttccgtagattgtaacataaaacttcttataaagccattttaaaggtttcttagaaatcaatattgtataagaatactctgtttgagcaatcttaaaatcaatttctttaaatagggaaatacttcctttgggagtaattttatatccacctatttttaatatatcttcctttagctcatcctttatttggataatctccatacttattataaaaacaacatagccttcacacactacaacggtaactatttttgcccatagtacatctggaacaaacatatgccaagctataaaaggaagcaaagctactcctaccgcagtcactagtagaagcaccctccaaatataatttttctttctttttccttcattagttaaattttcatcataataaagatgacctggacctgaaaagttaaatagatattccttaaaaaacgacaccatagccgctccccaggaagatttcttttgttccttcatattacacaatctcctctgctatatggttattttttgtttgacttctacattagcaatatttgttactaacattatacttcatcaacctaaaaaacagaagattttttcttgttcatctaaagcaaaaagcacctgtcattttcaaagcgaaaacagcaagtgccttatagttccatattcaattttaggtacaaaaaagtaggagaccttttcagatttcctgcttagcacagctgtgaagatttgcaggaacatcaaacgcagatgttccggaaactctgccagtttcgataaaatttccgtatagattctttccggcacactacggtcatggtggacatgcatttgtcacttctttaaaagataccagttctataggtttgctggggttcatccgttccttagaaaaatggaagagttccaaaaaccatacattcgcattccaattgatttcaggggcctgcaaaaatagaatttttctgctcattcttatgacagcaaatcccatgcttttcttcttcctgcaaaaaatgttccgatagttcctgttcaaaccgctgttcttcctccattgtcatggtttcaatatcagacacttgctcaaaaggtagcatcatatgtgtcacctccttaagagttcaataagagacatatttttttgatgtcttaacgcaatctctgataccaacaaagaacaaatctttaaatcgctttgagttcccgattataataagctatacttgcaattacaataagggctatacctgatccaatcataatccactgcaagggaagaatatcggccaaagggccaaacatagccataccaatcggtaaaaagccagcatacatcgtgccaagtaatccaaatacacgcccctgcatagaggtatccgctttttcttgtaacatagtggtaattgctgtttgcaccattgttaatgcgactccataacataccattaggccaaggtaaaaaataaaattctttgaaaagctcattccgattgcaaaagagccaaacgcaaaaagtccaactgccaaagtttttcctcgatgcttaaaacctccccatgtactcataataattccacctgccatcatacctgcgaaccctactacttccactgcggtaagataccagtaagtatcaccaaatactcgccgaacaagaagtcctgcgagatagcctgctggaacacaaaaaaaagtaaatagtccgtagatgattaaaagttttccaattagtttgtctgcaaaagcgtatttgacaccaattttcatgtcagaaaaaacactgaccttctcaatggaagtattttgtttcggaagtgccaagcaggacaataggcccgttcccaagaccgccgttacaatgtctatcataagcgtcgttctcaatgtgctgattgcaaaaactgcacctgctgccgccggagccgcaaaattaacaatagactgcattgttacattgatgccgttgtaccgcataagctgatcttccgggataagctgtgggataacggcattgaccgctggagtttgtattcctgcccccaaggagcgtatgaccgacataacaagcaaactgccgagcaaagcaggctccgatgaaatatgcggaattgccaataccattacgaaagtgacaaatgcaatcaacagatctgcgcctataatcaattttttcctgtggtatcggtctgcccatacgccgcctataaatgaaatgagaaattgcggcagataggaacagactgtaaatgcagccacccacacgccgctggatgtttgcatggttgcataccaaacgagcgccatttgaacaagtgtagagccaaagagtgtgatacattgactggttaagaaaaggagtattcttttctgccagccggtgcgttgcgtgtcatccatgttgtatatcctcctgttttttaggagggagcacaaagcgctgcgtgggatagccaaactctgtcagcaattctttttcggcaaaaccaagttgcaatagcatatctcgatgccctgtatcggccttgtcctgttctcgaaaggttgtcgtgctgatttcctgccctggaagatatgtttccaataaggcatccaagaataacttttgaagtccgctatttcgatattgcggatgtacgccaagaaattctatactgcccgaagaataggtaaatgccatcgctccaatgagaatatctccctcccttagcacaagcgcacgcttttcgtcaatactttcttccaacttagctaagtagtcatcttcatccattacgggatacccatcaataacaagccgcattaagttcatccaatcgacaatatctttcttttctgctaaccgaatatcctgtattgtaaattccatagccatcgttcctcgatgtaaaatgaaccgcaactgcaaaggataaaagttccgttcttcacgatactccgcaggcggcgatttatacatggccttaaaagctaatgaaaacgattgctggctctcgtatccacagataaaagcaatttcgataataggtttatccgaaaagaccagaagttttgccgcctctgtaagctggcggcgttgcacataatcatgaattgtcattcctacggttttggtaaatagtcggtgtaagtgatattttgaatagtgaaccgcctccgcaaccgtttctaattccagctttccgtcaagatgactttcgatatagtcaatgactgcctctatgctgatgactgattgattgcccatttatgttccctcctttccatcaagcataataacaaaatcaaagaagattgttttaataattattgcgaattttgaaaatcctctgtgaactactcagtgattgaattgccaagcatctagttccttttattatagttacctgatttatcagataggtacctattggggcctattccgtgatagatcttcgaaataatatccaggtacttaggaaataacataccagcaagagtataagaatggatatagtaatggataccactaccggcaaaccaaatcatacacctaactgtttcattacaagaccttttatatcctgtttctcgacacctaatttgcgaagcgataacgatacggtccgacatccaaaagctgctttaaagataagatggtaagacatattaccattaaaaccacggcaccataaatcattgctgtcttcagaatgaagttcataccctttctgcacgctcagcatttatatggcatcactacataaaatcctttgccttttcttcttactaaaactgaacttcttctttgctttttattctttaaccagtttatgaattacaaaataaactactaccatggctagagatacaaccaatccaatataaaactctggatacgcctacttcaaactcttcttttgcttcccaaggaaattgtgctgtataattaagaacaatcatatcacaatcgataaaaagaggaatatagtgtgctgcttctccccctttccatgtatataaataaccgcctttttcataaaatgatcctccacaaatttgaatttgataagctcctctaagagattatgtttcaattttcttctatgtatttcactactctatctatatttccgctttcatattcatcatgtgttaattcgaaacactcatccttattaacactgctatagtctatatacctagcaatatcttccggaattaaaaacaagtttactccttctcgtttcagcgattgtaaatctccatgattgacatcaacaattacttccgcttcccaacttttcgcttcaatcacagactgtaaattctcttttaatacagtacttctctttttctttaaaatgttaaaatgcccatcatgcccaatctgtgaatttctcccattcgttacatatggtacaatagctattttttttatcattaacttgtcctccttttccacttcttataacttttaatttataccaacaacttcagatttgttgctcacattatactctatcaacctaaagaatggaagatgttttcctgctccctaaaacaaaagcacctgccattttcaaagtgaaaacagcaagtgccttaaagttccatatcctgttttttgcttttcaccggaattgtccggctgacttcacgctctgccatttctttctttttgcggctcaactgctctataatggaacttttggctttcttcttgatttgctccgttccggcttttttgacctctggtttcatcagcgtagtttggattttctgaatggttgatttcatagcatttgtcattctggcaatcacgccatccaatcgtttcgttgcatactcgatttctttgaagccttccgctcaggggagagaacccatgctttagactactccaccagcttaatatcctccttgtgtgtttccagtttcacagtatcagcaacgacctcaaccgtcttgtcataggcaatatcggcaacctcgtccaccagagcttccacatcttcaatcttcatcgtgagttcttccaatttttgctcctgtgctgccacttgctccaagccttttcctgttgtggggcaatctctccatattgattttcacagtcgaacacatgacgctcgtgaatatgaggggtgctttcatccaagtgcagcgcccaattcaggatatggacatgagagccgatttcgcatgagttcctccttttctttttgatttcccctacaggagagacggacagcgaagctgattccttgcggctttctgcgtcaagtaatatacccagtactaagtggcgaaacgccacttaactgggcaaggctgccgcccttgacctgcacaggggtattgcattccctgtacccatgcacaaagagttgcaccctctgtactcccgcccgaacaaactgacttcgccctgtcccaagctctgtcagttccttcggtttcttcatctgaccttgacggttatattcagttgcggcagattgttattacaatgcctgttttagaatgtggcaaatattttacttttataaaatcatctttatgaataccattttcccaatacaaatttaagtcatatagtttaccattatccttttcttccacaacaacattgtaacattctaacttatttgatgattctatatttgaaccttttactacaatcccttccgttattactgctcctttgcttaccacaatcggaatatccatcaacgctgataatccaaaactgcaacttacaaaaatcatattagaaatcactatcaaattgataagaaagtcaactattcttttccgcttttttagcatatctcttagacgacattgtatcatcctgtctggattaaatctaatccacccttttcttatatatctcactaataaatatcctacaaacgcatagatgataaaaacttttccataaaacattaacaaaaataaattccaattcatattactccccctctctactatgcagtaaatttgaatataatgaaatttattgtgttataagaaattatacttcaacaacataaagaatggaagaaaaaattttgtgtacagagttcctgttcaagccttgtaacgcacatttccgcaaaatccatattcccccgataataggttctttcttcgtcacgatttcaacctcccttcattttgttgtttgtaacgcttcctttttctatcttcctgaattatagcccttttgatcagttactacagaataattgacattatgaaaattgattcctcatatttgtctttaactcaaaatatacccccattttacctcatttcttttttcccaaattgggtaaccgccagtgcaaaaaacagaccgaataccacaatcgcacacggcaggaacggaaacatcgaaaaagcagcatcggaagtttctgctgtaaaatcatgaagagaacaggatacaagatagccactgtaacagtacgggtaaacaatccacaatggcgtattcgcaaccaatataccgagaataacaagcagcaaattcaaccctacagaaagaagtggcttttcaaacagtacggtgattgcccacatagccgcaatgcaaggcagcattgttagaaacagtcccacgcaccatttcagcagatacaggctcggtaaggtttctgttactcccatcgtctgtgtcacaatcaatccggcgattacgaacacgacaagaaacactaccatttccatgaacagataaaaggtaagcacacagaatttcgcaatagatactgtgctgcgactgaccggcagcaccagcattttcagaatcccgttatttcctgtttcccgtcccgcaatcatcacacagactacaatcatgctaaacgggagcagatagtaagcgtagacaagcgcactttgaatgaacatggcaggccatgcattggtatattccggtgtaaagtaattgctcaaactcgcaaccccggaaatcactaccaataaaggtgcaacgaaaatcaggggtacgattttggatcgtcttactttcataaactcgatttttagtaaatcccaaaagctcatttcttatcatccctccttactcgtaacgtctgtactttgccaaccacaagcccactgcaaggaacaacaatgtttctgccaaagcaacaaaagtaaccatcggatcgggctgggcgctcatggctactgccggtttcagaataaccacaaaaggatgtaccagcaaaagcgtcaatcccgaatttgcaagagccataccgcttaggaaaccagcaataccaattccaagcgacacccacatattttcaaaacgagaggaaatcagcagcataaacgacaacaccggcatggatgtgagaaaagagtatccggcaaagcgcaccagcatacccatttcaaatgctccctccggcaagtacgtcatgccaatctgtgcaagtatcaagttttgcagcacgattacgccaaaaaatataactgtcagaatcaggaatttgcacaggtacatagtcgagacactcacaggaagcatatacatcttcttaaccgcacttcctttaaactccatgttgtagatcatgcaggtagcaaccacaataccgaacaggttcagcaccataatcatgccgtaaagctgggttagcaaaacatccatcgggtccaacggcagattcagaagtgtgtctttccgcacaaggaaattaacaaacgcgtaggtggctcccaagacaccaacagccagcagcacgggaatcacgcctgttcgcttttctttccgaagttcgattaccagcgttttcataattttgccctctgctttctgtccatgttgtctttctcaaccatagaaaggaacacatcctccagattatctgcagcgaagccggattgcagggcatattgtcgcagatcattcatgctgccctcaaacagcaattgtccgtggtttagaatcccaatgtcatccgcaatcaattcgatttcagacagcatatgagacgagatcagcaccgtgcaatcataaaggtctggcaaggattttactaaattacggatctcgtggataccagatgggtcaagtccattggtaggttcatctagaatcagtatcggcgggcgccccaacagcgccccggcaagacccaaacgctgcttcattcccagtgaatatttctttgccagccgatcaccaaactcggttagccccactagctccagagcatcttccattttggcttttggcaaccccaaaatgcgacggataatatcaagattttcccgcccggtcagatttgcatagaaagacggcgcttcgatgaatgaaccgatctcttggagaatggcaatccgatcccccggaaactgcttcccatcaatggtaaagttgccctttgtcggtgcagtcaggcccagcagcattttcatggtcgtggattttcccgcaccgttggggccgagaaaaccataaatgctgcccttgcgaatatgaagtgaaacattgttgaccgaagtgaagttcttgtacttctttgtcaactgttccgttgtaatgatatagtccatagaaacatctcctttcgatatttttatgttacaacttcaacctgacatctacattctcctgtccttacttttaccttactttttaagaagcgagaccgcaaaatggacagcttatgatataatagaaacaaagaaatcagattggagagaatgctatggacaattcttttttgcatagtaaaaggctcctgttggtagatgatgagcaggagttattgaaaatggtaacagatatattgaaagatgcaggatttgaaacgatccttaccgctatgtcagtcaaagatgccgttctgactgccaaaaatgcaaatccagatttaattgttttggatgttatgctgccggatggggacggcttcgctctgatgcagcagctccgtaccttcaccaatgtgccgatcattttcttaacagcaaaggacgaagcgacagacaaattatcaggattagggcttggtgcagatgattacatttcaaagcctttcatgccacaggaattagtgttgcgtatctatgcagtattacgtcgaacctataaagaggattcaccactgcttgttttagatgggtgtacgattgatttcagtagagccgaagtccagaagaaggacaagattatttctctgactgccaaagaacacgctttgttggaaactctcgcccgtaatgctggaaaaattgtaactgtagatgcactttgtgaatcactatggggtgataatccttttggctacgaaaacagcctcaatgctcatgtccgacgcatccgggaaaaaattgaaattaatccatcaaaacctgtatccctgataactattaaaggcttaggctataagctgatagcaaggaagtgatgtcatgagatcatttgcaagttacatatcgaaacaccttgcatcttttgttgcttttatcctgatattactgtttgttaacacggtagtatatagtctaacttttcaaaagattatgactgaggattataggaattcttccccgcaatccatgttggaaatgactgctgatgccgccacaccggagcaattatcggacaatatgatacaaaaacttcggcagaatcatatttgggcaatttatctaaatgctaatgggcagagttattggtcggttgatttgcccgacaaagtaccagaaagttacactattcaagatgtcgcattgttttcaaaagggtatattgaggattatcctgtttttgtctggaacaccaatgatgggctgttggtattggggtatccgaaagacagctatacaaaactcaccagcaattactattccattgcagcacttcgacgtctccctatctttgtgcttggaatgttgggattagatgttctgtgcctattttgtgcctattatttctccaaacgcaaaatcattcgtaatatcgaaccgattgtatcggctgtggaaactctgggagacggaaagcctgtttcagtttgtatcagcggcgaattatcgaaaatcgcaaatagcgtgaacaaggcttcttctattttgaacagacaaaatgaggcgagggcgaactggatcagcggtgtttctcatgatatccgcacacccctctctatgattatgggatatgcaaatcgtattgcagaaaatgaatctgccaacaaaaccatccgagaacaggcagaaatagtacagaaacaaagtgtaaagatcaaagaactggtacaggatttgaatttagtatcgcagttagaatatgaaatgcagccgcttcataaagaagtggttcgcttatccaaactgctgcgctcctacgtggctgacctattgaatacggggatttccgatagctacattattggaattcagattgatcctgatgccgaaaatgctgtgttggaatgtgatgctagattgatttcacgagccgtgaataatctcattcagaatagtatgaagcacaatccgctgggatgtaggattctgttatctttaagccaaacgaaaaatatccctcagcttattgtgcaagacgatggggtaggactctctgagaaaaaactacaagaactaaaagaaaaacctcactatttaaaatgtacagatgaacgcttggatcttcgacatggactggggcttgttttggttcgacaaattgtggcagcacatggaggtactatgaccattgatagtaagattaactgcggatgcaaaatcactctaatttttagctctacggattctatccaaaatctcacataaattagatatgaaatcattttgaatatttattaatgacaagaaaggcaggaaatctaaaaaagtttcctgcttccagtttcttattctccgtatactgacaggatacaagcacacgctctagatggtcaggcttcccatcctcatattctacagtcatacgttacatttcccctcctgtccttgtgaaatggactttcggaataatatccaggtgctggtgaaataacagatcaataaagcaaacaaaataatcaaaatagttcctacttgctgcaacaatttccaagctccgatatacgttctaatctgtatggaaaatccaataaataaaaacagtataaatgcactggatatgagaagagctaccataacagggactccgaaccaaatccctaattgttttaataccaacctgcggatatggttttcctccactcccatattccttaaaacctgaaagcgataccgatactttccagaatcagataattgctgcagagatagaattgtaaaacatataacaaataaaataattgcactataaatcaatcctgtctgtacaatgaagatcaatgcagaagtatcatttctttcaattgtttttgtagtgacagaataaacctcctgtccatccatcggcatatattcatggaaataatccgttaattgttcggcgtctgcataagaaagcggactttctgtcatgatataccgataagaatttgcgaccgtcagcttatcacacgtcaaatcaggtagaatcagaacaacattttgattactgtatattacttctcctagttcctctgttttcggttcaatggcagaaagaatcagttctccattatctgtagcgatcctatcgtactgggtttcgaaagtttccattgtacttttcggtgtaatggataaccactgtgttgaaaattcattttcagcaagagaaattttctcatatccaaacatttccatcaagtggttataatcagacaaggaaatagctgtaattgcactctgcccatgaacatccgaggctttcaaaaagtatgttgaaaaagtacagtcgtctttcaaagtaatgcgcttttcctcaaaaaacgaatccaaaaatgcgtaatctgtttcaggcaataattttacattctctgcagctgtataatcggaatcaatttgaatatcatataccactctcttatctaaaaatccctgtgcccattccaccaagaaaggggtaagtaaaaatagagaaatagataatgtcaaagtcaaacagattaaagtcattgacagtgtatttgatcctaattttgataaaatctgtccgaagaaaaacagattttcatctttatactttactcgtagactacgatttttcaagaccagaagtccatcactgaatacaacaaaaaatacactgacaagaaatatcagacaccagatgataaatgccagatataaattaaatgcccccttatccatcggaagagcaaaatacattttccagacaggaagcagacttacggttatcatttctgcaaatccgaccaatccaaccataagcagatattttacatggctgcaagattttcgtatcttcttttcagcaattcccaagcctaccataacaaaaggtattacaatactgattaaaacccatatttgaattgctgtttgaaactcatcagtaaggtaataagtcaatgtcctgatactataaatccccatcagaaaaaacaaaataaaattaacttttaaaaccttctccacccatttatgagttgtggaaaatgcttcattttttcgatctgcatgaagcatatcaatgatttttatctttctgatagtacggatctgaaacagtcctacgactgcaaaacaagcgccaaaaaagaaaacggtcagaaacaccgtatccggaaacaacataaacgaaaatacaaatggtttctgaaaaacctacagcaacatggcagtaataaattgtgagaaaatgactcccaatacaattcctaacaccagtgagaaaagtcccattaccaatgtttctataaagaaaagaccggcaatcattgattgctccattcccatgatactctgcactgcgaattctttttgctgattccttatcataaatcgattgacatactgcaccagaaaaatcaaaagcatggtaattaatataatcaccagcaacattccgtctcctaacacctccagattaaactccgcaccaatatctggtctataataacggctggtaatcgacaaaaatgcgtaaaataaggagatgcagacagttagtgtcataatataaatcaaataatcttttatagaacgttttacattttgaaatgccaatctaaagtacatcacttaccccgcctcccatcatggtaagaacattcaggattttatcaaaaaatactttacgggtatcactgccttttaagatttcagtaaagattacaccgtcacgtaaaaataaaatacgattggcatagcttgccgaaaatgcatcatgtgtaaccatcagaatggttgcacccagattctcattcatactctgcatggtagataaaagcatctgagatgaatggctgtccaaagcccctgtaggttcatccgccaaaatcagcttcggatgattgataattgctctggcacaagcacatctctgcttctgtccaccggaaacctgatatggatatttatccaaaatatcggcaatattcagactttttgcaatctcttccactctcggttctatttccccaaccggaatgtggttaatcgtcagagccagagcaatattctcacgaatggttaaagtatccagcaagttaaagtcttggaaaataaatcccagattttctctccggaactttgcaatcgccttttcttttatctcagttacatctgtaccatccaaataaatgtgccctgcacttaccgtatctatggtagaaatgcagttcagcatcgttgtttttcctgatcctgacgcacccataatccctagaaattcaccttcctgcacagaaaaatcaatatcctgaatcgcttttgttacattgccttcatttccataaaatttttgaatatggtctaattttaaaatttctttcatgatactcacctcgtcttttgatattattattgtaacggatttctgcctgtgtttgtatcaagttttctaacaaacttctaacaaaaatgtaagaaatgcagggcttttctcagccctgcacctgatgaataaaatgattgatttgaaaggacaggatcattgtcgttcctgtctcgcctgactgggcggcaattccaattcccagcttatcacaaagtcttttgcaaagataaagtccgataccggttgcattttgccggatacgtccatttttcccggtaaaacctttctcaaaaatacggggcagatcatttgcacagatcccgattccatgatcttctacaaaaagaaaaatctgatctccctgcaccttggtataaaagtgcaatacgggatgctcccggctgtattttacagcattgacaatcaactgattcagaataaaccggagccatttgtcatccgaataaaccgtcagttcactctcttccgtctctaaggcaacctgattctgcaataaaagatacttgttatctgcaatcgcctgatgcaccacatcaaacaaccggatttcctgaacagaataatccttttccgtatattcactacgggcataataaagcgcctgttctgtaaagcgattggttttttccagttccctcatcatttctcttgtaaaaggctctttatgattttcacacaatagtttcattgcagtaatcggtgttttgatttcatgaatccactgctcaatatattctcggtactcccgtctctcccttgctactgttccaatctgttccagcatagatttggacgccatttttaagagttgaaaataaacctgttcttcggcatgttccggttccggaagcatctctgacaacaagtatttttcttccagtccttctgccatctttactaatctatttaatcttctttttctctgaagaaaggtaaacgccaatacaccagccagtaacattgtccagatgataagaatcactgcaatactatctacattatttccgacaaagagcagaaaaactgacagcaataccatacaaacgatattgatgaggaaaagggggattttgtctttccaatactgttttccattcatagtgtatacccctgacggtgtttcgttttaataaagtctttaacgccgatctttgataatttttctctgatacggccaatatttacactcaatgcattatcatctacatagagctgattgtcccataaatattcaatcagatctgctcttgtgcagatggttccggcatgttcaaatagatagtacataatcttcagttcattttttgtaagttctgtttgctttccttccgcttcgattgttccagtctctaaagataaagaaacaccttgataagtcagatgtctgctttgtgtatcaggataagcacgtttcagcaaggaagcaatttttgcaagtaaaatggctgtgtgatagggctttgtgataaaagcatctcctccaagcataatactgttcaattcatccatatccgtattgcagctggtaacaaagataatcggagcctgtgaaaaactccgaatgccggaacaaatggtaaacccattttcttgcggcaatttaatatccaataaaatcaaatgtggatttatttttcgcacctgttctgttacatcagaaaaatcttcaatagcagatgtgtgatatttatttccctccagtactgtttgcagttctttacggatcaccggatcatcttcaataattaaaatttctgtattcataacaatcctcctaaactgcattataacataatacagctaaaattggagcaagtttccctgccccaattcgttttattccgtgatagatctccgaaacaatatccaagtacttagaaaataacatagcagtaagagtataagaatggatatcgtaatggatacttgcgtaattaaagcttcaattccgatataagcggaaatttcaacggaaacggattgcaagaagtactccacaacaatagcagaaactataatggataccactaccggcaaaccaaaccatacacttaactgtttccttacaagactttttatatcctgttcctcgacacccaacttgcgaagtactccaaaacggtaacgatactgtccggcatccaaaagctgctgtaaagataagatagtaagacatattaccattaaaaccaccgcaccataaatcatcgccgtcttcagaatgaagttcataccctttgcctcattgacttgcagcgtacttaatcgaatataatacccaacaccattttctgaaagttccggatatgcctttataaacttgttttctaaggctgctgcatctgaataagaaagttctcctgaggtctggatatagcgattccgattgacagaaagaagattttggcaaatgttgtcaggaaacacatatacaacttgcgtataggaattgtataaggtttcacccatcgcttcttgatgactggcctgttcagaaagtgtcagtcttccggcatcggtgtctactattgcatgactacgtataaactcctcttgttcatccgttgttacagccatatgccactgggttgtaaattcattttcctcaagcgtgaccgtcttatatcccagcatttctcgaatagcattataatcgctaagagaaatagcaaccacaggaaactcatgctttacacggctatgaaaatcttcgcgatttggaaggtaaagactaaaagtacagtctgcatttgtcgcaattccttcttctgccaaaaattctgttaccaactcataatctcctactggcaagtcggcttcttcatccacattattatatcgagaattgatctgcacatcatacatggatcggctatccaaatatcccatactccattcggtcagtattggtgcaattatgaacataagaatggccgttgtcagagtgatgcagatcaaggtcattgtttttgtcgttgtcgagagcttagatatgatctgtccaaagaaaaacaggttattcccttgatacctgtgtgcgggagatttgcttttccatacaacaattgcactgctggacagataaataattccgcatatcaaaaaaagtaagtctgcaacaacgaacatcaaatattgattaattgtacctgcgccaagggttagataatacttgctttcaaaaaccggtacaagagccgaaaatacagtattgggaactgtacagactaatagaccgataagcaaagtttgcaatgtccatactttctttttgcacagccaagtgaacgaccaaagcaaagtgagcgccgggaacatgatatttccccaaaatagaatatgaatcggaaaagcaaatcgcggatcaaagaaaaaaatcatcttttgaatccctgtttccaacatccatatagaaagcgccaagtagattccaagaatcgtcggcataaaccgatttttcttcaaatccggttcattttgtctatccgcagacagcatatctataatcttaatcttacgaatagtacggacattgaacagtccaactacaaaaaaactgattgtaaaaaaaacgactgtccaaagaacagtatccgggaacagtgtccatgtcagctcataactctgaccataggaagccagcagcatagcggacataaattgcgaacatagcacgccgagagcaataccaatgacaatcgatacagctcccatcaaaaaagtttcggcaaaaaagagccaactgattgttttctgctccatccccataatagattgtactgcaaattccttttgcctatgccgcagcatatagttatttacatagcgtatcaggaacaataacaacagggtgattgcacaaactgccaattggataccatcgctaaatgctgtaatctcataagctgttccaatatctggctgataatagctgctggatatggatagaaacgcataaaacaaagtaacgcagatcgtcaaggtaacaatatagattagatagtccttcgcagagcgttttgcattttggaaaatcaatttagcatacatcgtttttcccaccttccatcagagtatttatccagtttcaagattgtgtccatatcgtttcctccttctttacttctttttattataatggatgagagcattcttttgtatcaagttttcttacaaaattctaacaaaaacgtaagaaatgcagggcttttcagccctgcataggaaatcggttaatgtgaaaagaaagtatggcagtcgttccgcaatacaacctagctttttactcttccgagtctttctgatattctaatatatcccccggctggcaatccagcactttgcaaatagcattcaacgtagaaaaacgaatagcacttactttccctgttttaattttagataagttgacatttgcaataccaaccttttccgcgagttcgtttaggcttatctttctatccgccatcattctatcaagtcttaaaattattgccatatcaaatctcctttatatcatttcatctacttcttgctgtaattcacatccataatcaaaaataagggaaatacaaaacaagatgagggcgaataacccacacataaagaaggatgaaaatgccattttaaaaacagagagtacggaaaaaacagcaaaaatcagaacatacattgcaatttttcgtatctgaatagctgtcttagctgtaaaaggagaatttcctttgccaatacatccaaatattcttttggcattatatagtgctaaaaagatacagataaactctccaaggcaacaaaagaagaaaaatacgcattgcccaaagctaagagattgtcccgcctgaacagcagttgcccacgcctcacggaacatttccggagaaaaaagctgagtgcaaactataaccataattccaagcaatagcgatacacttaatatacccaaaataatgcagccaatgttaagaagtatggagataaaacgagcagattttttcaaagttttttgtttcataagatgtagctcctttcctttcagttcttaactcacagtatagcattatttttatctttgtcaattataatttaatgataaacgtaaaatattttactttttgcactgcttttttacaatcattccatttagttcttcccgaatatattggaaaatccgctcatcgccactcttcgtatcaaaaattgtttctaaatgtttatacagataaaagcatagtcccactcctagaagtaagaaaaatatcgtaggaaaactgcttcctgctataaaaaaaatagctacagccattgctgtaagaaagagcaatgtcaaaatttttatccttggaagaatacggaatgtgccaatgatccgcatgccatacgcttcttcgataaccgttccttcaaataaaattccattgcttttcataataccggcagacgctttcagtcgaagacaatcatttgaaaaatctgataatatttgatgacggtatgcttcattttctatgcaaagaggataagtggtttcttttaatctccggcgtaatgtttccttttgaagcggaatcacaatttcatacttcgtttgcttcgtgttgtccctccattccgtcccactcggaaaagcgatgcagttctttttcatttatagtccccctcttttttctttctcaagccaacaaagcagctcttgatagcctggatatagagcatctacaaacgtgagtttttcccgttttgataaaaaataattttctcattgttttcccctgtgaaacgatatacaatatcgtctcggtgaaagtctgccttttgaaacaacgtttctatccgcatgtatgcacctttgatcagtatcctcttttccctgcaataaagtcgcagaaaaccaaaaactgttcttttgacatcataaagatttctcccatcctacacacaatttttctgtcaaaaaatttacagagcaaacagtatatgaaatagtatgcaagtattataacattttcaaggaaactattccaatacaaacattccaaaacgtataaacgtttcctcataaaacactgtacatgcactctattttgtgctatactctacatcgcatttataaaatcagaagggatttcttaccctctggactggttcgtgaacttcccagtataaaaaaccaagtatctcatactgtagctctctgagcacagaatcaaaaagtaaaggagattggagaatgaatgctaaaaaagtcattattgactgtgatcccgggatcgatgacgcgcttgcgctgatgttggcactttgctcacccgaattagaagttttagggatcacagttgtctctggaaatgtaccggcaaaaaaaggtgtggcaaatgctaaaaaagtccttcactggatgaaccgcccggacattcctgtttatcttggagaagaactgccacttgtccgcccttacgtggatgccatggatacccatggggaagacggtctcggcgaatctaattaccctcaaattactaatcaaatcatggatgaaagtggtgtggagtttcttacccacacactgaaaaatgctgcccaaaccaatgacccggtgtcgatcattgcactcgggcctcttacaaaccttgcaaaagtgatccaagaggatccacaaagtcttgccggacttggggaattgatcagcatgggcggaagttatcaaagtcacggaaactgttcacctgttgcagaatacaactactggtgtgatcctcatgcagcagaaatcgtataccgtgcatttgaagacctgcctgtctgccaggataaaaaaattcatatggtcggattagatgtgacaagaaaaattgttctgactcccaacatcttagaatatatgtgctatgtgaatccacagataggtgagcggatccgaaagattacccggttctattttgacttccactggaaacaagaaggtgtcatcggctgtgttatcaatgatcctcttgcagtggcctattttgtagaccgtacactctgcagtggtatcgatgcctgtacgagaattgcaacagacgggctttgcatcggtcagagtgtcgtagatggatttgatttctggcatggacacaaaaacagtcacgttctgaccaaaacttctcctctggcatttatgcagatgttttttgacagagttcttggagtgcatcctaaggtaagctgttctgtcttagagcagattatgaaaggagactcacaatgagaaaattttcgacaaataagctttgtcttctcgcactttgttctgtaatcaacctcatcggagggcatatcgcgctgctgtttcggcttccggtttatctggattctcttggaactgtattcgcagcagctctgatgggacctctttcgggaatgatcccggggatcataagcaatctcattggaggcgtgactactgatatttatgctctttattacttacctgttcagatgatcaccggtgggattgcaggacttctctttcagaaaatatcattccacgataggaaaaggttgataaaaatcctgcttggagcaggaatcgtcagcattcccggaaccgtcatcagttcttccatcaccgcgatcgtgtttggcggaattacttcttcgggatccacacttttggtacaactgctccatcatcttggtctgggattaactgccagtgtctgtatcgtacaaggattgacagactatgcagacagagccattgttcttgctttaactgttgctcttctggctgtagttccttcttccatcaaaatagctgcagataaggagaaatctcatggaaaggtataataagatcaccaataaaaatccccgcgaaatcgtacttctgaaaggcaaaccatgtgcctggggcaaatgccgattctgtgattatattgatgacaattcccgggatattgatacaataaatgatttgaactatgaaattctctctcgtgtcacaggagaactcggagtgttggaagtcatcaactctggaagctgtttcgaacttccaaaagaaacattaaaaatgatcaaagatatcatcatcgaaaagcagattcaccgtctattttttgaagctcactggatgtatcggaaacatttgcaaaaaatgcgggagtatatgggaattccaattacttttaagattggtgtagagacatttgatcggagctttcgggaagactatttaaataaacatgctaattttgattccccggaagaagtccgaagatactttgactccccgtgtctgatggttgggatcaaagggcagacaaaagagatgattgattatgacatccaaatgctgaagatgcattttgaactaggaacggtcaatgtgtttacaaataacagtaccgatgtaaaaagagatccagaactggtagactggtttatgaataaatatgcgtatcttttagaagatccaaatgtagaagtgttatatgaaaagacagattttggtgtaggggactgagaataactctcgtccccctgttttagaataaatagcttctttattattttacattatatcagctatctgttaaatttctcttgcaatctgatatccttctgtaattgcatctttgatatttcctaccttctttgcatctccgatcaaatggtaagaaacatttgcttttttaagcgtttcttctaatttcgaatctggtctgtatcccatcgcaagcacaagtgtatctgcatccgagatacagtgttcttcaccattctctgtatagtagattttctctgcttctaccttttctacctttgccttacagtgaatctgaattccttttttcatcatccgttgtgtcagaagacttctgcccggaccagattcctgcagcatgatcccatctgccatctccagcaagatgatttcacgatttcttgggaagagatcattgacaagcggagcaagatagtctgcagtttcacaccctacagatcccccgccgatcactactactttccttccggcaaacgcttttcctgcaagaatatcgtctgcagtcacacaatgcttaaatgcagtaaatgcatttactacaattggatccgcacccgttcctgcaatgacttcatatcctgcgaattcatttttcagcatttcctctgtcacttcacagttcagacggatttctacaccttcccgggtaagttttctctccatatattgaatcactttcgtcaattcctgttttgcgatcggaactgctgcaagttttacaagtccaccaagactatcacttttctcgcacaatactacttcatgtccgcgtttttttgcaacgaaagcagcctccatgcctgccggccctcctccgatcacaagcacttgtttcttttcttgtgcagccggaatattatcctcgttttccagttccagagatggattaacggtacatgcgacacgttttccaaacatgatgccatttaggcaacgaagacatccaatgcaaggacggatttcatcttctcttccctcacaagctttctgtacaaattctggatcacagaggttcgcgcgtccgatcatgcaaatatctgcttttccatttgcaatcaattcttctgcgaaccatggctctgtgatgcgtcctacggtcgcaaccgggatcgatacttgttttttgatctcttctccgactttgctgtgggatcccatcggtgttcccggtgcagggatcgaacttcctcgcataattgtagttcctccggatacatggatgaaatcaaccccagctttttctaactgttttgctacatagacagcatcatttaagttctgacctccgtctgtatattcatcaccggaaatgcggacatcaatgatgaaatcctttccgcacatttttctgacttcctcaatgacctccaatgtcagacgcagtctgccgtggatgtctccgccgtaagcatctgttctcttattgtagagcggggaaaggaatccgccaagtaagccgtgagcatgggctgcatggatttctactccgtcaccgccagcctgcttcacacggaatgcagcttccccgaactgtctgatgatcactttcagttcttctatagtcacagctcttggagcttcttttgcatagtaaggaccaacattggacggagcgatcaactgtggagtccccggtatcggaaatgccatataagctgggtgaaataactgtggaagaattttggcaccatatttatgaactgcgtcggtcagtttcttccaacccggaatgtaagaatcgtcgcaaatagacatatctcccggcagataaatataagtaggctctacggtagtgacttccgtaatgatcagaccaactccaccttttgcacgtgccgcataatgctccaccaactcatctgtgacataacctttgtcagcaagatttgtagaaatcggcggcataaatacacggttttttactgttgtcgttccaatctgaattggggaaaataaatgttcgtaagaattcataatttgtatctccttcgtattcatttgttcttgctcttattgtaccatgtctttcttttccaaacccgccctttcagatacatcagcaggcagattttgtcctattttcatatgagattacaaatttttttgaaaatctgtgccgattttgtctttacttatccgaaattttccagacaaaacaaaagagaaatcttctgccattttttattcctgcaaaaaatttctctctgcttctttcgactttttatgtttcctcaaaaaatacttctatttttccatttgctgcaactgtgacatcgctccacacttcttttacctggcagcagaacttctcttgctccttccagatcacaagctttgcatcttcatacaccatctgtctgtttccttccacaagatgagaaagcagacttttctgctcttcatccaactgcataactcttccttcctcatctttgctgtacttgagattttgtctaaactgcctgcggtaagcactgggcagaattccgtagagctctcggaacgtttttgtataagcttttccatttggcattccgcattcaagagcaatctgttcaatctgctcctttccctccaacaacgcttccagcgaggcccgcacacgaacataagataaatatttactaaacggaatccccatatattttttcaaaagtttggaagtataagataagctgaaagaaagctgatctgctacgtcttgaagcgtcaaaggttctttaaaatgttcatcaatgtacttgattgctttaagataattctcctgatactccgattgaagtggaagctcctccaacgaaatattttcgcgagctgaaaaacaaacaagttctgccatcaacacattcaatcgcagcagattactttgaccatccatcaacatctttacaagctctccgatcttacgcttcaacggaaaatagacagaaggattcttctggctgttaaaaactcccgaataaaactgtccttttacttctcctgtcatcgactccggcatacgatcaaagtcgatatggattgtcagaatttttccgtcatctttcccacagcgttttctgagcagatgcatttcataaggtgcaatgaggatcaattcttccttgtggacaatggtagaaaactgttctgtcacagcttcatattctccacagagcacataagaaagttctagactgctctgccttgtaaaaacattttgtgaaaatccattgatgctaaggctcaaaggataaccgaacttctgcccggaaaaatcataatatccattcatatctttcataatttcagatcctttcgctgtatactgtgactgtttcagttctgatgaatctgataagttcccgcctcaagatctacggttacttctgtcccgtcagcaaagacagttctttgtttcttataatttccatctaaaaattcatggcgcaccatctcagaataagcaaccttttcctgaagttgtgccacagtccgatagcgctcaatctccttttcgagttcctttccttctgcttcgcagtttaagtatgcggctccaccgtttaaaagtgcatacagcatatagtctcctgcgggctgatctgcatccatcatccatggaactaccatacagtcatggtatacaaggttaaatagcggaaccggaaccccaagcatcgaacccttttcttctaccataaatgaatacgggctgtaatgggcagtcacaagacttggcactgcccagtctatcgtctcctcggaacttgcaataatttcatttgcgtttagaaaatcaaaacattttttccgatattccagacattcttttcgtgtcattgtatgccacggatgcgcgcattcatccggctcgttgcaggtaaagacatccagatacgttccttccagctgaattccttgacgaaaaagttctgtaaagtttcttctcaagtaaagtggagactggcttgcacagatgtatgtctgccatcctcctgcccaacggcaaaaatccggttttttcccttccggagaaatcatggagaattcaggatcatacgtctttgcatcaaaataataatcgcggtactgatcgtggattgcaaaaatataattcatctctttcatagatttcgacagtgatcgcattccttcccatccaccggcttcctcacaagcaggcagataatccggatgctggttatcatatcctgggtttccccatccatccagatgcagataaactttttccagtccatgttcttttaatttcctcatctgcgcttctcttactgcaaacggaatcacttcatcatttttttctggatgctctttatcataatagaaagaatctggcgatacatgtgtcttaattccagtatgtacgatagcagaaccgataaatttgtctacaaccggattttttgctgctttttcttttaacgtaacaagcagtgcgttctccttcgcgtaagccctatatactttacatagatcattatagtcggcattctttaagaaacgatatttgatggtacgcttataagaaagctttccaaggctcggaagccatctgacagatacatgacaataatcggactgttccggatgttctacctgatatccggcatcccacggatcacagacaatcccgatatacgcagctccacatctgacctgtccaaaccatggcataaatgcccctgcactgcacatttgcccgtcaaatacgatttttccggcatcatatttccagtcatttgggatcagtaagccctgacggtttgtaattacggtataccaatcgcttgtctttttgcgaaactccatctgccccggccagtaaaaatttccaatgcactgctctgattctgtaagaggattcagctcaaagaagatatcctccgtcgcatactcaatccagatgactgtctgaaaacttaaagtatcctctttccccgaaagatgaaaaccggaaaatacacttctgatcccacagccgacaccggtattccacgaaaagtgttctagttttccagcctgatgaaaatatatttttttatcatttacataaaaatgtggctgatacgtcttttctgaacgccatgtttcgccatgtgctgtaatctcgatgccgagcgtttctatgttcagaacaagcgctgtactctgatgacttactttgatttcactcatatctaaattccctcactctttttcttttctcttttcctaccaatacatcaaacatctttgatagactgttttcagaacattatagcataaatcccgattctgcgaaacaaaaacagagaggagactctatttcctaatactcctctctgcgataccttctttcattaataaaggtggatactatctcttgcaaatagatcaagtcctgttataaaaatctttccctacatcaattttctaaacagttctttcaaatcttctacgcttgcatcttttggatttcccggagcgcatgcatctgcatgagctgactcagcaaggaactgaagatcttcttctttcagtgcctccagttttgtcgggattccaacgtccacggaaagtttctgtacagcatccacagctgctttccgatattcctcgacagacatctcatcgacacctttcactcccattgcccgcgcgatttcacggtatttttctcccgaacactctgcattatactccataacgatcggaagcatcatcgcacatgcaacaccatgcggggtatcataaacagcaccaagtgtatgtgccatagagtgggcaattccaagaccgacatttgagaagcccattcctgcaatatactgtccaagcgccattccttcacgtccttctttttcgtttgctaccgcgcttctcaacgattttgcaatgatttcaatcgcttttaaatggaacatgtctgtcatttcccatgctgcttttgttgtgtatccttcaatcgcatgtgtcaatgcatccataccagtggatgcagtcagccctttcggcatagaagacatcatatcaggatctacaattgcaacaactggcatgtcgtgtgggtctacacagacaaattttctttttctctccacatctgtaatgacatagttgattgtaacttctgctgcagttcctgccgttgtcggaacagcgatgatcggaacacacggttttgttgtaggcgcaacaccttccagacttctgacatcttcaaactctgggtttgcgataataatgccgattgcctttgcggtatccattgaagagcctccgccgattgcaacaatatagtctgcgtttgccgctttaaatgccttgacaccattttgcacattctcaattgtcggatttgctttaatatcagaatacatctcataagcaagtcctgcctcttcgagtacacttgtcacctttcctgttactccaaattggatcagatccggatccgagcagacaaatgccttcttaaatgaccgggcttttgcctctgttgcgatttctttgatcgctcctgctccgtgataggatgtctcgtttaacataattctgtttgccattgtcctcaatctccttttctctgatatagcatgttttctttactctatgcctatctcatctttcttttgtttacattttaacaattctttttccaaatagaaagttacaaaaaaggaaatctgtcactttacaaaagtttcagctttttgaatatagcagaaagttcttcgggcatcgcggcaacaagcagtgatgcaagctcttccggtgtccctttccattgtcccagcagccactgtacagtcatatagatcgatccgtgacaatacatttccaataaaaatcgaacgcgatcggaaatctgcctttgcgtattctgctcaattttctctgtataaaactggagaatcaactgaaagtcatgatccctcagacaattctggtcatcatttttgaatgctgcccggaaaaacatcttctcctgacgaatataacaaaacttattgacaagtccctcatagatggtctctccttctcccatgtgttcaaatgactccaggagaattttgtcaaaataccaattgatcagatcgtatttgtccttgaaatttcgataaaaggtctgccttgttataccacacgcctccacaatctctttgacggtaattttttccacgggcgccgttttcatgcattgtttcatcgcatccgcaagccggtatttcatgcggtcagtattttttccgtatgcattgctgtcacacaaatattccataggtattgctccctcttttaccacaaatctttttcctctctcttctctgcttttagacagattttgtctctttctaagttcatctttctgtcaaaaatccttaaattcattatatacagattgtctgaagaacacaagaaaaaagccggcacgctgtatgatttggtaccggttttttctcttgttttattgttttttatttttagatggtcggctcctcatgatatttccgatatcccggatgactgcccgtaacctgatactgctctctcatagagatcagacggtcgatattctggcgagaaagttctttggcacctccgagtaattttgcatttaaggaaatctgcgcaaacaattccagtgtttccatccggtaatatgccccgatgatatccggccctactgccagtgcgccatgattctgtaaaagcatcgcatcatgatcggcaagatacggagcgatcgcttcaggtacttcctctgtggaaggtgttccgtaaggagtaaccggaacggagccgagggaaatcacagtttcaatcatcgaataatcatccagcggaatgtttgccactgcaaacccggtcgccaccggcggatgtgcgtgcagcactgctccgacatcttctctttctctgtagcagcgcagatgcattttaatctccgaagaagggcgcagtcccggttctccgtcaagaaccttcccatttttatcaatatggacaagtttctccggtgtaataaaacttttgctcatacctgtaggggttgcaagaaatgtcccatcttctaatcgaacggaaacatttccatcgttggctgccacccatcctttttgccacattttatgacacacatcacagatctgttctcttaactctctatactctttcataatatgttgtcctctctcacttttactgtatgtttccagatttcatatatttcatcccacacctcggtatccgaaggctcgtatcgtttaagatcttctgaagttctgatcagaccacgaagctcctttacatcttttacttcctgctctgcaatgagctgcatcccaagatttccgtataccgttgcttcctgtgggccagtgataaccggtaccttgcaggcattggccgtcatctgacagagcagattgctttggatccctccacccaccatatagatcgcccgatattttttttgcgtacaatcttgaatttcttccattgcatttctgtaacaaagtgcaagactctcatcgattcctctgacaattgctcccggggtttcgggaatgttctgtccgctctcttgacaaaatctttgaattctctttggcatatttccttccgggagaaaaatcggtgcatccgggtctaacagacagcaaaacggttttgcagattttgccatgtcctcgagctctccaaaggaatacgcctgtccttcccgcatccattgcctgcggctctcctgaatcatccacaatcccacaatatttttcaaaaaggaaattttattttcacagccgccttcatttgtcattccgtaggaaaatgctttctcattgatcagcggctcctttaactccgtcccaaataatgaccatgtaccacagctcaaaaacagaaaatccgcttcttctgccggaattgccgccatagcactctgcgtatcgtgacctgccaccgtaataaccttcaatgacttcacaccaagttcctgactcagctctcttcggagcattccaagcggtgtgccaggcatggagatatctggaaacagtcttctggaaatccctgctgcttttaagatttcttctgaccagctttttcctctcgcatccagaagctgtgaagtggaagcaatcgaatattccgcagtcctttctcctgatagaaaatacccgaacaaatccggcagaaacaaaacttgctctgccatcccaaacaagtcttttcggatctttttctctgccaggagctgatagaaagtattgatctccataaactggcttcctgtaatttcatacaaaaaggactcttctatctgtgcagcagcttctcttcgcattccgctggtacgcagatcacgataatggattggatttgtaagaagttgtccgctttgatcaagcagaccataatcgacaccccaggtatcaattccgatgctgtctgtgttccctcctgcttttaatattccttttttcagttcacagaacaatctgaggaaatcccagcacatcacggaagtctctttgccccacaaagtcaccggttcatttgcaaaacgatgtatttcttccagagaaatccggtttccgtcaaaatttccttttaccactcttccgctggaacctccaaaatcggccgccagcatgtgcttttctgccattttctatccttctttctactttttagtcgttggagcactccagaagttttatcgataaagcggtccataagcggaacatgcccgatagtcctgcccttctttatccattccgaacgcattccatgcagctggacggaaaatgttctcttctgctacattgtgcatagaaaccggtatccttaacatagaacaaagtgtgatcagatcggcaccgatatgtccgtagctgattgccccatggtttgctccccaattgttcatcacatcataagcggtccgaaatgccggactgtcattggttctcggaacaaaccaagtacacggccatgtataatctgttcgcttccatagaatgtctgatacctcctccggcagtcggatcgtccatccctctgcaatctgcagcgcaggtccaagacctttgaccaaattcaggcgaatcattgtcactggcatctctgcattggtaagaaatctcgaagaatacccaccaccgcgaaagtatccaaaatctgctggattccatgtgacattttctaggatctgtctctgatcttcctcagtcacttcataccatggcttcataactgcattgccacaatcatctttcgcttctccacaggcatccagacatgctgcgccggagttgatcagatggatcattccgcctgctttggcagcttttccttccatggtataccctgttgctttccatacagcctctgggctccagtaagttctgacatctgcaaaaatctgtgcacgatttgtcaaaagtttcataaacaacattccaattccgtttaacacatcattttctgtagcaaggatatacggctcacgcggtccatcccagtcaaaggaggtatttaaaagtgcctctgcaaaatctccatttggataaaaatctgtccactgtctctgtccctgaaaacctgctgccaaagcattgtgtcccatctgttcttcctcgcatccttccggaagattcggatttccattcatgaggtctttgataatacacatcatttttacaacaaattcccagtcatggtctttctgttctcttgttttttgtaccgcttccggatttttatcaaatccttctttgcagtgttcttttgtccatttgagtgccttctgaaattcttcttcatcgtagattccttcttccatgcggcggatcagttctacttcgtccacagattccatacgcataccgagatactcttccaaaaatgcagcatcgatgatggagccaccaattcccattgtcacagatccaatctgcaaataagaagttccacgcatagatgccactgctactgcacttctcccaaatcgcagaagcttctccttgacatcttcaggaatctcgcgcgcggaggcctgctgtacttcatgcccatagattccaaatgctggaagacctttctgcgcgtgtgttgcaaggacacttgccagatagactgctcctggtcgctctgtcccgttaaatccccagactgcttttatcgttttcggatccatgtccattgtctcggctccataacaccaacatggtgtcacagtgagtgtaatgtcaaccccctcccggcggaacttatcctggcaggctgccgcctctgcgacaccgccaattgttgtatcagccagaacaacttgaacaggctctccatttgcataccagagattctcacgaaaaagagttgccgctgcttttgccatgctccatgtctgctcttccaatgattctcttacttttaaatatcctcttcttccatctatcgttgggcgaatcccaataaccggataagcgccgattcttctgtttctgctcatcgttgtacctcctccattaaattcttcttataggttgcaaagtcgatcgtctctccactgagccttgattcctccgctgccagtgccatcagatgactgtctacagaaattccggcacctgtcggtacctcgctattttctgaatttccaagaagctggacaaaatcgtgcatcattctctcgtcacttccgctgtgtcctttggacggcgtatgtaaataaatctcctcggtatttccactgacaaaatcaaaaatacggattcttccttcctccatatctccttgtatttctccatttgttcccatcagcgtgattgtgcgcttacattcttttgtaaaagcactcatcacaaaggaaacttccacgtcattttcaaattccatattgacaatctgatggtctactaccgtattatcacagcgaaacacacagcgcccgtacggtcctgttttcagcgccgtgagcactgattctttgtcacttgtcggagtcaccgcatagacgagtccgtctgtctctgcctttggatgttccaaataaaacttcggtgcataaaaagcacagtgatctctatgagggcatccatccatgcactgctttggtgcatgtgcaggcgcattttcttctttaaaaaaagtaagtttcccaaaagaactgatttttttgcatggagcttttgcaagccacagaagaatatccatatcatggcagcacttctgcaggatcattgggctggattcttttgcatttctccagtttcctctcacaaagctgtgtgcatgatgccagaacccgactgattccatcgcctgtatgctcattaacttccctattttcccggaatcaagtaattctttcagttttgtataaaaagaggaataacgaagcacatggcagattgccagcacccggttatatttttccgcaagcattcccatttgaatgatttcttcttttttaggcgacatcggcttttcacaaagtacatgataccctctttgaagagccatcgtcactggctcataatgcatctgatcctgtgtgcagacaagtgcacagtctgccatacattctttctgaagtagcttttcataactttcatattgattttcttctggaattttatgaagtgctgctatctgctttctgcgcgcaatatcaggttctgcaactgctacaatttgaaattcatctggatgttccagtgcataggaggcgtatacatgtcctccgcggagccctgctccaattaggatggctgttatttttcccatgagtctttgtctgctcctttctttttcaggacaattttcaaaacagtatctgtctgatctggaagtggataagtaaataccggattttctccaaaagaaacaaatgctgattcttgaaactgtacggtattccatgcttctccacgattcatctcacttccatctgccagatagtaaacgacatctaattcctctggtgtaatcccgtaaagtggcatggctcccagcgcttcctcaaagacatgtgcataaatcacatcgcctttttgcgtgtatctcccccattccggtttcggacgttcgcagatagtatttccataaatactttcaccgtttttcttcatccatacaccaatctcttttaaaattctgacactctcgcaaggaatatttccttttgcatccggtcctacattcaaaatcatatttccgcctttgcttgtacattctactagcttgcgtatcagcatctgcgatgatttaaaggtatggtcaaaattgcagtacccccaatggttgttcattgtcgcacaaagttcccatggaatcatctctccctcctgatcccggattccctccggcggaatgatctgttccggacttgcaaaatcaccactgaagatcgaaggctccgccgtcgcaatacttccatgatcttccccggaaccttccagacggttatcaataataacatccggctgatacattctcaccatgcggatcaactcctcagcgcgccatttctccccacacatatcatcgtaggaaaagtcaaaccagagtagatctaactttccataattcgtcacaagttcttttacttgtccatgcatataatctaaataacggtcaaaatcaattttttcatctttgtatgcctcacagtttcgcatcggatgctgacggtctttgtactttggaaaatccggatgatgccagtcaatcagtgaaaagtaaagaccaactttgatgtcttcttcccgacaggcatccacaaactctctcacaagatctctccctgcttttgtgttcgtacacttatagtctgtcagagcagaatcaaacagacaaaatccatcatgatgtttcgccgtcagcaccgcatatttcatccctgcttcctttgcaagacgcacccacacttttggatcatagtcaaccgggtcaaacaggtcaaaatatttttcatactctttcaccgtcatctcacgctcggacataacccactctccgcaggcagggatcgcataaagtccccaatggatgaacattccaaatcttgcatccataaaccattttgttctttctctaatttcctgattcatttctatcttctccttcttttcatatgctgtatgattatccttttactgctcctccggaaagtgcttccacgaaaaacttgctgaatacacaatacaagataaccggcggcaggatgatcacgaccattgccgagaacaaaccattatagtttgtccggaatgatgttgtaaatgtagataacaatgccggcactgtcagtttttcgcggtcgatcaacacaagagaggcccagtagtattcattccagttatttaaaaaggcaagaacccctgctgtcataattcccggacgtgccatcggaaaaataaccttctgccatgtcttcacataaccgcatccatctattcttgccgcatcttccatctcctttggaatattcatatagtaatttttaattacaaagaagctcactgccagaccactgcaagaataaatcaagattaaggcacctctcgtatcatacaaatgcaatttattgaccagattataaaccggataggtcaatgcagtagctggaataaacatggtcgaatacagcatgacatttacaagctttttccctttaaaatccagtcttgccacaacataggcagacatggagatcatcacgatactgatcacaactgatacaaaagaaatcagtaaactgtttccgaaataccgcatcacatgcagatcacggaaagtagaaatatatccttccagatagatagattccggaagcataaatcccggacgtgccatcggatcttttttgaagctggaaagtaaaagccatacaagcggaacaagcgctacaaatgctgcccaacacagacagataacagttacgattcttgtcgcttttgagtcttttttcattcggttttttgatactttctgtccgttttttctcatgaacgttttcctccttttgtcggtcttttccatgtgagattaaaaagcatatttatgatgacaataattaacattcctgccagaatctgtacaacggcaacggtatttgcacggccaaactgtgtacgaggacttgtaatggcaagttcccggatcacatagctgatgctgtaagtaccggctgcaccctttgtgagaaaatatacttcattgtaaagtaagaatccgccagttgccgctaaaatacataccatgcgcagtgtttccttgatcatcgggatcgtaatataccaatcctgctttaacccacttgcaccgtccagtctggcggcttctcttacttcttccggaactgccataatatttccgagaatcatcagtgttgtcgtaccggtaaagaaaatatatgcagctgtcattgcccagaatgccggtccttcaagcagaagaatgctgtctttaaaatccttgttgaacaatttgataatcgggtttaccaccccataaagcggactatatagctgtaagaaaatcatacccatagctgctgttgagatcatattcgggataatgtaaatattccggatcaattttacccctttcatctttctggaaaatgcaagtgcaatcaatgtagcgatcgggatttggatggcaactcccaaaagtgcccacagagaagaatttttcagtgcctcccagaaatatggataagtatgaaaaatgtatttgtaattatcccacatattttttatgccaaaaaattccggtgcattgatatttgtgtaatcccatttgcaaaaggaagtgacaaaaactgtcacgatcgggtacaaatagaaaataacaaaagcaatcagtgtcggagctagaaatgcaaaaatgaatcccttcctccgccaaccaagtctgttatgtctgttcatcttttaaacctccttctaagaacgatttctgttctgccaaagaaaaagagctgtcgttttacgacaactcttttctacaaaacattcgttatccgataagcgctgtcagttccttttgcagctgttcaaaccggctgtcgatatctgttccggataccgcacattccattaaagcattgatcatggatgttcttacatctgatccccatacatagttcagatcctctgcaatgtattctgcatcattgacaagtgtacatgcttcggcgagtttgatcgtcgctgcatttccactttcttcggcaagtttatttaagtctaacgttgtgttacatggatttgcctgtacttctgtaaagatcttagactgcacttcttcgcttgtcatatattttatgaattccaaagcaagtttttcttcttccgcactcaatccgctggaaattgtaagtccagatcctgctgaagacaaagctacattttcagggaagattgtcggctgaatcttttctaccatactttcatcgattccactggcattccagacaccatttggaagcactgccatcgtcccttttttgttaaagtcatccatcacatttccaagatcttctacggtgtgatcggagccatttgcctgatccatcttcgccactctcttaaatgcctcttcaaacgtcttagattcgattgtctcctgtgtcatttctgactccaaaagttctcttccttcctccgtagatgcaagcattgcattgaacatgatgatggatccctgacccgctgcatatccgtatgtatcaccgccgagtgctctgactttctccattgcagcctcatagccatcccaggtacttaagtcttctaacgttactcctgcctgatctaaaatttcctgattgtaccacattccacggctttccatctgatcgtgtacagaataaatatgtccgtctatatcattctgcgtataattcagtcctaccgcatctttcagattgttctcatcgatgtaaggtttcatatccagcacaagttcctgcgcaattgcggcctgcggcactgcagttccacaatctacaagatctgggaaacttccccctgcaacctgtgagcttacgatgtcatcccgattttcaactgcaattggtttgaactttactttgccgtctgcatggctttttgcaaattcttcataaatatcacgcatcacttttgccgccggccactcactttcctcatggtaatatccgtgatagaattccagcacagcttctgcattttcttttttctcctttgccgtcccttttgcttctttggaatctccacatcctgcaagcgccgttgttcccatcgctaccgccaatgcagtactgattactcttgctttcattttcttcatcctacttcctcctccacgcacagtttaaaattctccttgttttgtgcattcgtttaatttatgtgcttattttaaacatttttctgtgcattttgaataaagtatttttacgaatagtttgttctatatttactttttaactttttatatggattatatttacttttttagtctgttttgactatttcgttctagtaattgaaaaaaaacttctccactcatctcctcctgaaaaaatatcggcaaatattcctcgaatatatgcatctgtgcactgttccacaaatttgccggtacttggatctttatttctgcctgtttcacttccgtagccgcctggcagaaccggggcattttttcgctatactgttcgattgtaatctgaggatttgccggcatctgtccggttttcagcaagattctctcttgcacctctttgctgagcatatacttcaaaaattttatgcttgcatcgattcgtttttcattctctgtatttccaagaagatatccaagccccgcggattcacaggcaatctctgcaccttctccaaaaggaagaagcgcataagataccggaagggtctcatcaatcataaatgctccccaaattccattgatgtacattgcaagctttccatcattgaacaggtctgtttcatcccgatagctatattccttgcttaaaggttttgtataatgccacaactctttctgctgctctaacacagtacagatttctgactgagacattggaaccttgttctgactgatcgcaacactccctctccctctattctttgcaagcatctgatctgtgatatagagatatccctccacggtaggtccaagaggcatcacatccttatttgatgtctcagaccacgtttgaatcttttgacatgcgctataaaattcttcccatgtctctggaatagacgtaattccagcttcacgaaaaatctcttcattgtaccagtaacctccaccaagcataaggacatcggagacggtatagagcttaccatccctcgtcttccaatactccatactagatggagcaatgctgtgcaacaattctttatcctccttaatgtatggcataagatccagcgccagttcgttttctatcataaactggtacaaggattcctttcctgcatccccacagaaaatcacatctggaagatctcccacaagaattctgtcctctgcccgttctaccatctcttttcctgtcggcattgcgatcagattcagagagatatccggatattttttctgaaaatcggaatagattttctgcatttctttgtgatccatctccgtgcttccccagccatgcatcactgtgatctccacctgcttttcctttctttcactacaacctgacaggaaaaatactgctcctatcatacagataataaatatcctcttacttttcctcatgctcctcccctcctacatttctgaattcttttggcgacatatgcgtatatcgtttaaatacacgggaaaaatagccggtatcctcaaatccaacagcctctgaaatctgatatattttccagtctgttgtagtcatgtattcttttgccttttctacacgctttctcaaaatatcatcaaagagatttatgccccttttatttttatacagtcgacttaagtagcttccattggcatgaagcgcttccgccatctcctccagtgtgattttcttttccaggttttcctcgatatagcgaagcatctgatcatagagactatcattctctttcttttcctccagctctacactgactgacaaagactctttttgcaacttttctaaattttgtatcgccttttctactgctcccgggagttcctctaggacggaaattttcaacacatactcacacaccccatacttgatcgccgctctcgcatactcaaactcagaataggcgctcaaaataatcacctgggtctccggatacgtttcatagatatactgacaaaccgccaatccatctgctcctggcattcggatgtctgtaattacgatatctggtttctcctccttcattctgtctatcagtttctttccatcttctgctacatacttaagactgcatcccatcttttcccatgaaattaatttttgcagtgcctcccgaatataggcctcatcatctgctgccatcacgttccacatcatccgctctcctctccgagggtattacaatctccacagtcgttccctctcctttttttcctgtcaccttccatgtgtggttttctccatataaaatataaagaagtcgctttgtattttccaatccggtatgtgtatgcccttctttttcccggaccgtttccacatcttcttcctcaaaccctacaccatcatcttctacaataatatgaagccgcttgttttgttcataaagtattacccgcacctttccactgccctgttttggttccagaccgtgcgataccgcattttccacaagcggctcgatcaaaagtctcggaatcagattttctttgactttttcttccggacagataatctcataagtgatcttgtcctgaaatctactattttgaagatatagataaaattccactaactccagttcctctgccactggaatcataatctccttttttcggaaaattttccctctcaccaattcagagaatgcccgcagacattgatacagttcttcgtctcctgccaattttgccttcagactcagcatggaaaggatattaaactgaaaatgcggtgtaatctgtgcctggagatactttacttgaagtctcgttgcggtaagttctttctcatacacttcaagaatcaaatgctggatcttatccgccatctcattaaatactacagatatatcatggaactcctgaatctgaaaatcatccattcggatatcaaattgttcctccccaaattcatgcatactttctcttactttcttcaatggttttgacaatcgatacccagaaacaaatgcaagagcggctgccaggacaagtgccagaagaaggatgaataaaaacgcaaacaatgttggacgaagaacgacatagagattttctttcccgactaccgaagaaatctggatatcaaattcgccgtcagcactgctgtataccaaattatcgccctctatttttcttccgtccgaaaataaaatttcatcgtttcctttgatttcccatccccagtcctggtacccttccactgccgagaaaatctcttttatcgcctctctctctatttgcaccatacagattccgacgttgttcatactttcatcatatattgtaaaacagagataccacttgccatttcggatataactttgatatcgacaattttcttcataaaactctgttaaaatgtgctgacaaatttctttctcctcctttgctgccaaaacagtcagcggataatagcgtctgtcaagttccttccctactttattaaataaatgtacactttcaacgaatggggtttgctctgccaggtttcccgccgaaaaaagttccatcatatatccaagctgtttttccgcattttcctgatcataagattcattttttaaaaatgcttccaataatggattatgacggatagaaactgcgccatctgaaataaactggatgtggctttggatctgctcgtttgtactgtccaggacatattgcatatcttcttttgcattttgtaaaaataaaaaagaaaatacactgatcagaacaactcccaagaggaacagtgtccctacagaagtcactactgtcagaagtgtaaattcctggctgagtgtttttcgttttttctcttttcccattttctgtctctgaatcatatcctctgcttccttaaaataaactctaatggatttattctagcatagcttttccataaagtcatttgcttttgtagtttttcttctctatttcatttaaaatcttatattttttatacattttgcccaacaaagaaaaggcggaacatttttctatgcaaaaataagttgaaaaatattcatgacaaacgggagaaaataatgacgtattttttgatgaatggtataatataagaaatttagcagcagtgaaaatgatttttcatagaaatgaaaaacaaatgaggttatagcagtgaataaaagttatgattatatttagtaatctcgctattcgattaaaagaataacgagattttttatttcagtctatgtttctagataggaaatgtcaatttttatctctgatctctcctgtactttcaattctgttacttatgatacggtgctccttctataatccgatatgcacgataaatctgttccagcaaaataacacgcatcagttgatgcggaaaagtcattttggagaaactcaatgcataatcggatttttctaaaacttcttcgctaagtccaatcgagcctccaatcacaaaaataatatggcttttcccttgaattccaagttgttcgattttttgggaaaattcttcggaagataacaatttcccattgatttccaaagtaatcacataggcaccttcttttatatgctttaaaatacgttccccttcttttctgcgaattccattttctaccaatacgcttgcctgatcgggtgttttctcatcagccacttcgatgatctccaatttgcatgatttgctcagccgctttgtatactcggcgattgcatctttcaaatatttttcctttaattttccaacagtaataattgtaattttcatgttcatctccctgctctgtacaagacagtgcttctatcttatttcttttctcctattattctagcgaaaaaaaggacttccgtttcagtcatatacggcagtccttttttgtcacatcagatctgactgagatatttcctatctcagtgcttccctgaaacaacgatgatactatcttttatttattgcttaagtattcgtgaataccttttgctcctgcttttcctgcacccattgcaaggataacagttgctgcacctgttacagcatctcctccggcatagacaccctcttttgttgtcttaccgttctcttcttctgcaacgatacatttccatttatttacttccagtccttctgttgtagaagagatcagtgggtttggagatgtaccaagagacatgatcacagtatcaagatccattgtaaattcagatccttctacttctaccggacgtcttctaccggaagcatctggttctcctaattccatcttcacgcataccataccttttacccatccattttcatctactaaaatttcttttggatttgtaagaagatcaaagatgattccttcttcttttgcatggtgtacttcttctactctggcaggaagttcttcttcacttctacgatatacgatatgtacttctgcaccaagacgaagagctgttcttgcagcatccatcgcaacgttaccaccaccgatgacagcaacttttgttcctgcagcgattggtgtatcataagattcatcaaacgctttcatcaggttgcttcttgtcaagtattcatttgcagagaatacaccgtttgcattttctcccggaattcccatgaattttggaagtcctgctccagatccgataaatactgcctcaaatccttcttcctcgatcaattgatcgatagttgtagatttaccgataacaacgtttgtctcaaattttactccgagttcttttactttctcaatctcttttgcaacaactttctgttttggaagacggaactcaggaataccatatactaatacaccgcccagttcatggagtgcttcaaatacagttacttcatatcctaattttgcaaggtcaccagcacatgtcagtcctgccggaccagatccgattacagcaactttgtgtccgtttgtcttctctgcgccaactggtttaatgtcgtgctctaatgcgtagtcagcaacaaaacgctctaatttaccgatggaaaccggttctcctttgataccacggatacattttccttcacattgtgattcctgagggcatacacgtccacagattgcaggaagtgcagaagattctccaatgatcttgtaagcttcttcgatatttccttcttttacttccttgataaatcctggaatattaatagctactggacatccctgcacacattttgcattcttacagttgatgcagcgagttgcttcttccattgcttcttctttgttatatccaagacaaacttcttcaaagtttgttgcgcgtacttttggttcctgctctcttacaggtactttctttaatacatctgccattagttgtcacctccgcaatttccacatccgccatgatgtgtatcgccttcctgcaatttcaaaattgcacggccttcttctgttttatacattaactgtctcttcattgcctggtcaaaatctaccaaatgtccatcaaattccggtccgtcaacacatgcgaatttgatctcatctcctacctgaagacggcatgctccgcacatacctgttccgtctaccataatcgggttcatgctgacgattgtaggaatctctaattttttcgtcagaagacatacaaatttcatcatgatcatcgggccgattgcaacacatctgtcatattttttgccttctccgactaatttttcgatcatgcttgttaccattccgtggtgtccgtaagaaccatcatctgtacagacataaagatttccagcaacagcttccatctctttttcaaggatcagcatctcttttgtcttagatccaacaattacatctacatctattccacgttcgtgcatccattttacctgtggatatacaggagctgccccaacaccacctgctacgaacaaaatctttttattctttaattcttcaagatcttcttctacaaattcagaagcacatcctaaaggacctgtaaagtctctgaagtaatccccctcttttaactctgccatcttatctgtggaagctcctacaatctggaatacgattgtcactgttcctgcttctctgtcataatcacaaatcgtcaatggaattctttcccctttttcatccatttttacgattacaaactgtcccggctgacagtgtcttgcaactcttggtgcttcaacatccataagaaaaatcttatctgctaatttttctgccttttgtattttatacatcttgcgcctcctaaaattttatatattacctatttaccgctaagccgtgaataagcatacatgattattaatataatatatcattcttcgttaaagttcaagtatatcttgcgataatgttaaaaatttatcggcattttctagtaatatttcctaaagattctttaaaaaaacttttggaaacaaacaaaatggcacatcttacggaagacatgtactcctgcaaaatgtgcctttttgattttctatctaagtaatcattcaactgcctgattcgggcaaaacctctttctcaaaaggttgttctcttgacagactttctaattagaaatcaacttctgttccgtaataaatacatgtaaataatctctccattgtttccggatcgattgctcttggattagaccctgtacaggcatctccaactgcattttttgcgatttcagaaatcttttctttgaattcatcttctttaattccaaactcttttaatgttgcaggaattccaaggattacgttaaattcattgattttttcacataaactattgatcagtgctcgttcagaagctccggcaagacctactcttcttgcaatctcagcataacgctttgcagcgacaggatcttttgcattatacttgatgacatatggaaggtacattgcatttgcaagaccatgtgtaatatgtcctgttgagaatgctgctcctgtcttatgtgccatagaatgtacaataccaagcaacgcattagaaaatgccatacctgcaaggcactgtgcattgtgcatctgtgctcttgcttccatgtttcctttgaaagaagctggaagataatcaaataccatctcgattgcctgaattgcaagcgggtctgtatatgcacaattcaaagtagatacataagcttcaattgcatgagtcagagcatccatacctgtataggcaacctgatgtgccggaagtgcttctaccaactcagagtcaacaattgcaacatctggtgtaatattaaaatctgccaatggatatttgattccttttgcatagtctgtgatcacagagaatgcagtaacttctgttgctgttcctgatgtagacggaattgccgcaaactttgctttctgacgcagttctgggaagttaaacggaatacataaatcctcaaatgttacatctggatattcatagaatgcccacattgcctttgcagcatcaattggagaacctccgcccattgccacgatccagtctggaccaaatgcgcgcattgcttctgcacctttcataacagtctctacggatggatctggctcaacaccctcaaataactgaacttccatgccggcttctttcaaatagttcactgctttgtcaagaaatccctgacgcttcatggaacctcctccgactacgagaattgcctttttccctttcagatttttcagttcttccagacacccttttccgtggtaaatgtctcttggtaatgtaaatcttgccattgtcatgcatctcctttgaatatgtattgttaatttttaaacaattacattatatcactgttaacaatttaacgcaattctttttttgttattttacaaacaatttattttcttcttacacttccttattcataagaatatgtgagggtataattcctttttgtcacagcacttgcacgtccctttttgtcgatcagcactgccgaaaacaaagtatttccttctggcatttcaattggttctgtgtatttatatgaatcttctgaatccttttccggtacctcaccattgaaggtataatatgcctcatatccttcaggaacttcaatttcaatcatcgtatactcatagtactgtcctgtcgttggtgttacaaccggtgcatcttccaaaggtaattctaccgtatatgtcttctcttccgtaagacttgggactccttttttatttacagcaatcgctttcactgtagttgtaccttccgggatagaaatcggttcctcatattttgtgctgtctgttgtaggttcggagccatcgatcgtatagtagatttctttcgctttggatgtcaaggttaattcctgtacttcatcatacttactttcatctaaactaaattttggcacctttacctgataagattttaacgcagtaagaacactttcatcctcacactcatcaagaaggagcggaatctgtgtctcctgatctgtggcaatataaaaatcaatcatctcttcatacagttctacactggtaggatttgcttcgatagcatcccagaataccatctctgccctgtcaagatcttcctgtgcattgtacacagccgcaagcccggcatacgcttctgcacgcgccggctttttctctactgccttctcaaatgtacggatagcctgatcatatttctgctcctttgccaatgcatatcctttttttatcttgccactataggaacttctataaattccggcactcagaagtgtcagtagtccaacagatgctgcggtcataccaatcaacaaacgtctcttcttccttctgacttctcttcgacgcgcaagtcgtttctttctccgtgcttcttcttcagcttcaatctggcttcttctctgcacaaattctcgtttctgctgctcttcctgtttctgctgttttaatttctcctgtactgcctggcgataacgctccagttcattttctgaagtttctcccccgccaatggcatcccgcacctgctccgccagcatatcatccagcggattgtaatctggaacaattctgacttctgcgccacaatacggacaatatcctaggtcatatgtaatttctgctccgcattttgcacatttcatttagtaaaaaccccctatttgcatgccgcctccacacagttatacatcagcatagctcgtgtcatcggtcccactcctcctggaaccggtgtgattgcgccaactttttctattacgtcatcgtaatcgacatccccgcacaacacattgtcttcatttcggtgaatgccgacgtcgatcacgactgcattttcttttatatattctttcgttataaattttggtttcccgactgccgccacaagaatgtctgctcgctttgtaatctcctttaaatctttcgtttgggaatgtgcgattgtcacagttccattctcccttagtagaagaagcgctgtcggtttccctacattgttacttcttccaacaactacacactctcttccacggatcgaaatccctgaacgtttcaaaagttgaatgactccagctggcgtacagcagtcaaagccatcccctccgatacaaagcttcccgatattgaccggatgaaatccatccacatccttcgccggatcaattgccttcacaacttttgattcatccatatgagatggaagcggaagttgtacaagaattccatgcacatcttcggtgtgatttaattgatcgagcagtgcgagaagttcttcctctttcgtttcttctggcagctcgtaagagcgcgattcgatcccgatataagcacaatctttctttttcccattcacatataccgtagatgcggggtcatttcccacctgtatcacagcaaggcagacagattttccctcctgtttcagccttgccacacgctcttttaactcttctttgatctgcattgcaatctgttttccgtcaataatctgtggcatatttcatctctccttagaataaacctgtaatatttccacttgcatctacatcaatatgatttgctgccggaactttcggaagtccaggcattgtcataacagctcccgtaagagcgacaacaaatcctgctccggcatttacatacacttcacggatatgcatatcaaaattctgtggacggccaagtaatgtagcatcatcagaaagggaatactgattctttgccatacatactggaagatttccaaatcccatctgctcaatctttgcaagctgcttttctgctgccggagcatactcaactccttttgcgccatagatttcttttgaaatcgtctcgatcttctctttgagtgtcaactcatcggaatataacggtgcgaaatggctttcctttgtctccaaagtctgaagtaccttttctgccagttcaattccgccctctccgccgtgttcccacactttagacaatgcaaactcgcatcctcgctcctcacagaatttttggataaatgcattctcagcatctgtatctgtcacaaacgaattcagtgtaacaatgaccggaacattatatttctgaatattttcaatatgtttttccaaattcacgattcctttttccaatgcttccaaattctcttctgccaaagcatttttcggaacccctccattgtattttaatgcgcgcacagtcgcaacgatcacaactgcatctggtgccagttcactgcttcgacatttgatatcaaagaatttttccgcaccgagatctgctccaaatccagcctctgtaatggcaatgtctccaagttttaacgccatctttgtagctcggacactgttacatccatgtgcaatgttggcaaatggtccaccatgtacgatggctggtgtatgttccagtgtctggatcagatttggtttcatcgcatcttttaaaagggctgtcattgcacctgttgcctgaagcatatcggcagtaaccggattgccagagaagtcataggcaacgataatcttgccaagacgttcctttaaatcttgaagattattcgccagacagagtaccgccataatctctgaggcaactgtgatgacaaaatgatcttctcttaccattccgtccattttgcttccaagtccaactacgatatttctaagagatcggtcattcatatccaggcatctcttccagacaacctgccttggatcgatctgcagagcatttccttgctgaatatgattatctaacattgctgcaagcagattgttggcagaagtgatcgcatgaaaatctcctgtaaaatgcagatttaaatcttccatcggaacaacctgtgcataacctccgcctgctgctccgcccttaattccaaaacatgggccaagggaaggctcacggagtgcgatcactgcctttttatttaattttgccattgcctgtccaagtccaacacttgtcgttgtctttccctctcctgccggtgtaggattaatagctgtcacaaggacaagttttccatctggtctgtctttgatctgatcccaaagttcatcagaaagttttgctttgtactttccataaagttccagatcatcctcctgaatcccaattgtctctgccacctctttgatcggcttcatctgtgcttcctgagcgatttgaatatctgtcttcatcttctcttcgtcctttctttttatgcatctgctgcacttactttatacatactcctctatgtactgctcaaactcttccatagacatcagtacctttcgcggtttggttccttcctcctcgccaacgacaccagcttcgaaaagctgatccataatgcgtgctgcacggttaaatccaattttgaatacccgctggagcattccgatagaagctttgtctttttctataataaaacgtcctgcatctacaaagtagacatcgcgttcatcggctcctccacctgctcctgcagctgatgccattcccgtctgtgcactgtttacatgattttctacttcttcattatatacggcatttccattctttgtcacgagatattctacaacattttgaacttctttatcagagacaaatgctccctgcacacgggcaggcttctggtatcccgatggataaaaaagcatatcaccttttccaagaagtttttccgcaccgttcatatcaatgattgttctggagtccactcccgaagacaccgaaaaagcaatacgcgacggcatatttgccttgatcaatccggtaataacattcacggacggtctctgtgtcgcaagaacaagatgaattcccgctgcgcgggcaagctgtgccaggcggcagatcgcctcctcgatttcccctggtgccaccatcataaggtctgcaagctcatcaacaataatgacaatctgaggcattttttctggcttttcaccattttctatctgtttttcaacctcagataccttttcgttatatccccgtaaatcacgcacattgtattccgcaaataaccgataccgcttatccatttccacaacagcccagtttaaagctcccgatgctttcttcggatctgtaactaccggaatcatcaaatgtggaatcccattgtagacacttaactctacaacttttggatcgatcatgattaatttcacctcatccggatctgctttatataaaatactcatgatcagtgtattgatacagacagattttccagatcctgtcgcacctgcgatcagaagatgaggcatcttcataatatctgccacaacaaccttccctgcgatatctcttcctgctgcgaaagcaatcttggaagtactcttttgaaattcttccgtttccagaagatcccgcagcatcaccggggaagtttctttgttcggaacctcgattccaactgcagcttttcccgggatcggcgcttcaatacgaatgtcagcggctgccagattcaatttgatatcatcggcaagaccgacaatcttactgacttttactccctgctctggctgaagttcatagcgtgtcacagatggtccacaacttacatttgtcacagtaacacgtactccaaaattataaagcgtctgctgcaacttgttcgctgtctcacgcaaatgtgcatcggaatccccaccacctgcttttccacgcttcaatagcgaaagtggtgggcgttgatagtttaattttggttgatgttccgtttctttcctctctcgttcaacttcttctgtcgccttttgtgtctcttcctcactggatttctttttctttgctctcgtattttttttctctgttgcaggatccggtgcaaatggatctcctgccggagctacttcttctaaaacttcctgtttcaaagtaggctctgcacgattgatcacaaaatccagcggctgctcctcaaatggaatttcttccggttttaattctttcagatcttccttaggctgtgtgagtgtagtatcaaatgtcacacctgatatatgctggtctgctttggccgcttttttggcctctcgtttcgcagctttctgcgcttcttttatcgcttttgtttcttctttttcagcacgcgcttcccttttcgcagatgcctgtgtccgtctttttctgacatcttccttcgcagatgtgtaaacttttgcactgccctttttcagccctcttaaaaaggacttttccgtgatcagcacaagaaagatgatcattaaaataatcactatcacataagttcctgcgactccaactgccggacacaacaattttgtaaaaatccctccgagcagtccgccgccctttttctccttcgctgcatatctataaaaggaaataatagtctgctctttttcaaatggaacagtaagcaactgtaaaaacgtgcagagcatgaaggaaaaaccaactcctgcccccagttttatgtatgcaaaagaattacctctgtttgaaaatacgaaagcagtccctaaaaaaagtaaaaccggcatgatataagccggcagtccaaagattccgaacaaaaatgcagaaactgcatttccaagaaatcctcccagaccgaaattactcaaaataagaagaattgccactgctaatgtcaaaagaatgataatctcatcacggaaagaataactgttttgtgcctttttcccttttgtgcctgccttttttgttgttttgcctttctttgcagccatacaatattccctccttgtttcttattcgcaagttgtggcacaggctatttcccataccacaacaaaacatactatgtttattataacactattttttgttcgcttcaatcattgcctgcaatttttttaatgcatcactgatacctccaaccgcatcgatcagtccttcccgaacggcatcttctccttccagcaatgttcccacatcttttactagctgtgtcgagtctagcatcaactcttcgacacgttcttgagaaatacgggaatgttctgcgagaaaccgagtaatacgatcttgtgtccgctccatattcttatagctttgtaagacaccaataaacattccggtcgaacgcactggatgcacgatcatagttccactcggtacaataaaagagtagtctgccgacaccgcgagaggtccaccgatagaatgactgcctcccagtacaagcgaaactgtcggcttactaagagatgctatcatctccgcaattgcaagtcctgcttccacatccccgcccattgtattgagaaggatcagcactccatcaatttcttcattatcttctatttccgcaagctttggaagtagatgttcatattttgttgcttttgtatttcccgatactgcttcatgaccttcgatttctccaataattgtaagaagctggatacgatgcttttctctgtctttgtcaagttcaagcgctcccatttctttaatttgttccgtctctttttcttgatgattatctctttcttcctgtcccatttcacacactcctgatattttctttttagtatgtgcagaaaataatatttcatactttcctggaacataaagaactctttgatcatataaaaatacgtctcacaaaacaatgtatcccatccatcggacaacagtattctgcaagacgtattttatttatttcttcatctgtaccatttcatcaaaacaggtcggagtttcttagcttaccattagacataggcaagtgcttgctccaaatctgcaataatatcttctacatgttcgattccgacactaaggcggataagatctggctgtacccctgcttcgagcagttcctgttcattcatctgacgatgtgtatgacttgccggatggagcaccgatgttctcgcatctgcaacatgggtaacaatcgcagccatctgaagatgatccatcatcgcaaccgctccgtctcttcccgctttcagtccaaaagaaattactccacatgtaccattcggcatatactttttcgcaagttcatgatacttatttccttccagccccgcatagttcacccatgccactttctcatggttctcaagatactcagcaactttctgcgcattttcacaatgtctctcaaccctcagacacaatgtctccagtccgatattcaataaaaatgcattctgtggagactgaatcgatccaagatccctcatcaattgtgctgtcgccttctggatataggccagttttccaaagcgctctgtataaatcactccatgataagtttcatccggagttgtcaatcccgggaacttttcttttgcagcatcccagtcaaaatttccactgtctacaatacatcctccgacacaagtcgcatgtccatccatatattttgtagtagaatgtgttacaatatctgctccccactcaaatggacggcagttcactggagtcgcaaaagtattatcaacaatcaatggaacctgatgtgcatgagctgccttcgcaaacttctcaatgtccagaacaacaagggatggattagatatagtctctccaaatactgcttttgtgttctcccgaaatgcagcatgtaactcctcttctcctgcatccggatctacaaaggttgcttcaattcccatttttttcaatgtgtgggcatacagattataggttcccccataaagtgctgacgcacatacaatgtgatctccagcttccgcaatattcatgatcgcatagaaatttgctgcttgtccagaggaagtaagcatcgctgcaactcctccttccagatcgcagattttcgctgccacggcatcgttagtaggattctgaagtcttgtataaaaatatcctgcctcctccaggtcaaaaagtctgcccatctgctcactggactcatacttaaatgttgtactctggtagatcggtagcactctggcttctccatttttcggcttccagcctgattgaatacattttgtctctggtctgtaattattgctcatttgcgttgcctcctgcgtattcattctgattttttctcactagaatctagtataccattcagaaaatatttgcacaagagctatctttttcatgttttttaatttgtaattgaaaataatttatctaactatgaaaattttatgcaaaaatgacacagccactcgggagtttgacacatcatttttataactttccttagaaaccccttatttaagccattcaaggcttattttttcgtcaaattttatgattttatacgtgctatttcgtgctatctatagtataataaagaaaaaggggtggaggaattatcatatgtatgtttctattacaggaaataaaggaaatcaagatgtttatatcaaacaatcttatcgaaaagataacggaaaaacatcctctcgtatttataaaaaacttggaaaatataatactctcttagaacagttttcaggcaatgaaaaagagctaatggactgggcaaagaaagaagccgaaaaagaaactcttgcttacaatcagcaaaaagaaaaagtctccctttctttgtctcctcttgctcgcattccacttgacgaagaacgcgtatttaatatcggatatttatttttacagaagatatgcagcgagctaagaatggataacatttgcagaaatatacgtaatcatcataagttttcgtatgatttccaagcaattctcacagatttgatttatacaagaatactggctccttctagtaaactcagcagttataagtactgtcattctttattagaaccgccaaaatattcactccaggatctttatcgtgccttatccgttctcgctgaggaatccgactttattcaggaagaattatacaagaattccaactttattcatccacggaattctaagattttatattacgattgcacaaactattatttcgagattgaagctgaagatggcatcaaaaaatatggaaaaagtaaagaacatcgtcccaacccaatcgtaactatgggactttttatggatgcggatggtattcctttggcatttgatatatttccaggaaaccaaaacgaacaactcacattaaaaccaattgaaaagaaggtgatcaaagattttaattgcagtgaattcattttttgttcagatgctggtttaggtggaaaaagcaatcgttttctgaacagttttggtaatcgttcttatgtgattacttattctttgaaaaaaatgaaaaaggaagaacgtgagttagcactcttgccaactcagtttaaggttcctggttccaacaaactgattgacttgcggacacttgatgaatccgatccaaaggtatacaacactatttattataaagaatacccgcttgtaacaggagatatggatgaaacggtcattatcacctattcgccaaaatataaagcttatcaaagtaagattcgtaatgctcagattgatcgagcgaaaaaaatgatacaatcttcagataaaacccgaaaaggaaaaggttcaaatgatccagctcgtttcattcaaagaacctcagtcacagaagatggtgaaatagctcaaaaaaatatttatcaattagatgaagctaaaatcctagaagagtctatgtatgatggattttatgcagtggttacaaatcttgagggagatatcagagagattattaatatcaacaaacaacgctgggaaatcgaagaaaactttagaatcatgaaatcagaattcgaagcgagacctgtatttgttagacgcgaagatcgcatcaaagctcatttcctgacctgcttcattagcctattagtttatcgattattggaaaagaaacttggagaagagtttacctgcagtcagattttagaaacattaagaaatatgaatgttacacttttatccaaagacagtggctacattccttcttacaaacgtacaaagataacagacaaactacatagttcctttgggttccgtacggattatgaattcatacgcaaatctactatgaggacgatcataaaagaaacaaaacagaacaactagaaaaatagcacatatcgttgcaaacaagaaaacggctacaccacccatgtttacggggcttgtagccgcatttttatttttcaactgtcaaagatgggagtataccattcagaaaatatttgcacaagagctatctttttcatgttttttaatttgtaattgaaaataatttatctaactatgaaaattttatgcaaaaatgacacagccactctttcacctggttggtgatcgatctgactgtgccatttattcttttaagagcaacagctcctttttgctgcaaaataactacatgctatactctaaactgaatttcttattcatcccagttgtggtacacttcctggacatcatcatcttcctcaagcagatccaatgtcttctgaatatttttcagatcctgttcatctgtcaactctacccatgtctgtggaatcatggtcacctctgcatttgccatcggaattcctgcttcttccagtttcagacgaacttcactgaaatcttccggcactgtcaacacttcatagctgtcttcctcttccacaaaatcttctgctcctgcatctaaagcaagcatcatcaattcgtcggaatccatatcgcaatcttcttttgcaataatgatctgtcctttctcatcaaacatgaaagaaacgcatcccggagtcccaacatttccactaccttttgtgaaggcgttgcggacattggatgcagtacggttcttattatctgtcagcgctttcacaatgatcgctgttccatttggtccatatccctcatatgtaatgtgttcgtaattatcagcagatccttcacccgccgctttcttaatactgcggtcgatgttgtcatttggcatattgtttgcttttgcttttgcaattacatctcgcagacgactgttatttgccggatccggtccgcctccttcttttactgctactgcaagttctcttccgatctttgtaaagatttttccttttgcagcatcatttttttcctttttatgcttaatattcgcaaattttgaatgtcctgacattactctaacctctttctattttgtatttcactgctatattctatcactaatcttctatcttttcaacttcaaccaactcgatcatattattgtctacgcgaagaattctaaaacagtaaacatcatattgtacctcgcacgtctcatgttcagctggaatccgttcaagtttcgaaatcaaaaagccattcaacgtctcattttcttcatcttcaatctcgattcctaaaatctcctccagatcatccaatgctactttccccttaacaagataggtcccattttcctgccggaagtacaatgtttcttcttcatcatattcatcaaaaatgttcccgacgatttcctcaatgatatcttccatcgctacgatccccgctgtctgtccatactcatccaacacaataaataaatgattcttttctgtgttcatctgtttgaacaaacgggacagtccttttgtttccgggataaagctgacctcacgaagacaatcttttaattcttttactttgaccgggcgaagctctttgtttaaataatatttcatcgcatctctaagatggatcgtaccgataatatcatcgatattctcctcataaaccggaaatctcgtaaaccgctcatccagcatgaactgcaaagcatgttccagcgtctcactgccatccaccgctacaatatcctttcgatgcgtcatgatatcacgagcatttttcccactgtactgcagcacattcttgatcattcgcacttcgttttcttcaaggtatccctgactgccgcactcttctaccacatgttcaaccgcttcctgcacttcttctttgctctccggactctctccggatactatctgcttcaaatttttccacagacgcctctcttcttccatcgtctactcctttactatgtatgaagctccagactgattttcagtgcttcattaacttttttcattagttcttgatctagatgacaaacctgctccctgagcctctgtttgtcgattgtacggatctgctctaacagtacgactgaattctttaccagtctgcatttttttgcatcaatctcaatatgcgttggcagtttcgccttattcatcttcgatgtgatggcggcacagatgactgttggactatgtttgttcccaatatcattctgtatgatcaatactggtctgatacctccctgttccgatccgacaactggacttaaatctgcataaaaaatatcccctcgttttacaaccactctattcacactccgattcttcaagatacaaaaagtatttcctcttttctcggatgtattctttagagctttattttatttaagcaaaataatctacctgttcttcaaccttcccatcctgcacatagacacgcgggatccgcttcccaagatcacagacaaactcataattaaacctgccagataactcgcttaacttttccaccgggagatactcttcctgatctcttccgatcaacgtcactttatccccaaatttcacctctgggatatctgatacgtccaccatgaactgatccatgcagattcttccgataattggagcttttttaccgcgaatcaacacatatccggtatccgaaaggcttctcggatacccatcaccatatccgatcggaatggtcgcaatccgcatctgatgctctgacacaaaatcaccgccatagcttaccggcgtccctgccgggatgtcttttacaaatgcaatatggcttttcaaagacaatgccggttttaactgcaccttttccttatcgacttcctccgaaggatagagcccataaattgcgatcccggcgcgtaccagattataatcagccctgcgaacatctataattcctgcactgtttgacgcatgaacatacgggaaagtaaccccttcttcttccagtctctgtgtcatccactcaaacttttccaattgcatcattgtaaacgtcttatcttcttcgtccgctttagcgaaatgggtaaaaactccctccagcactaaattcggaagttctgcaatttccttgatttcttcaatactgctttcttctgcagaaaatccaagcctcgccatcccggtatccagtttgatatgtacatatgcctgctcccctttttcaactgccagagctgaaatcgcctctgccatctcttttgtataaacattcatacggatttcatatttcaacatctcccaatattgatctgggaaaatacatcccaacaccaaaatcggcttttgaatctctgccgcacggagcacaaccgcctcatctaatgttgccacggcatatccccacacataatcatatgattccagcatcgatgcaacctgcacagctccatgcccatatccgtctgttttgatcacagcaaccatctcagttccttctttgagattttttttcatctgttccatattccatgctactgcatctagatctatctttgcatacactctgctataagttttcatttatctgccccttactactttttattctgttcttttaacacttttcacgcaaaatcatctctgtgctttccgcggtcagcacttctgcaatcccatcaagaatatcacttgcaagaacactataactgccttttttcttctgtgcagcatctcccgccaaaccatgcaaaaacaccccgagtgttcccgcttcatacggctctgttttctgtgcaagtaaccccgtgatcatgccgccaaggacatcaccggctcccccttttgccatcgactgattgccggaagtattcacatatactggccgtccatctcttcctacaagtgttcgtgcatctttcatcacacagacagacggaatcgatccgagaaattcctgaaaataccgaaaacgttcttcttttaattccttcacggaatgcccgcatagccctgccatttctttcatgtggggagtcaatatacaatccggtgtcaatttctcaaaaagtgccctgtcttttgacaaaatgttcaatccatccgcatcgatcatgcacggcttttttacacagcgaacggtagttgaaagaaggtgctgtgcggtctcactcatcgaaagtcctgaaccgattccaacaacatccgcccattccagcagttcctttagcttttcttcctcatacctttcatatgtggtaatgatcgcctccggaagcagttgctgcaagttcgactgattctcttttgctgtataaatctgtacaagtccggcacctgtcagatatgccgcctttgcactaaagtaagcagcacctgccattcccggacttcccacgatcaaaagcactttcccgtagttacccttgtgagcatccggatcacgcgtaggaagcagatttttcaaatccgtcctatcgtaagtatagcacacatctcccctcccaccatatacagaaggttcaattccaatggaggccgtcacaagctttccgacaagcttgcgcgccataccaaacaacatcccaatcttttgaaatgcaaatgtgactgtaaaatctgctgcgaatgcaattcccagtacatctcctgtatctgccgaaagtcccgatggaatgtctacagcgacttttatggcatccatctgatttaagttttcaatcacattataatatgtcccggaaacctgtcttgataatccaattccaaaaattgcatctacgatcaccgtataacaatcttctcctacccgttcttttacaggtactccatagtggaccgcgatctgtttctgaagccttgtctcctctgtcatagaagattccttcccgacaaaccagacatccacagcatatccttttagatgcaaaagtcttgcgacagcaaaaccatctcctccattatttccggaaccacagacaacgagcaccttttttaaatctagttgctcagactccatcatctccacaacagaaagtgccgcccgctccatcagaaccatcgacggcatccccatctctgtgatcgtcttttggtctccctgtttcatctgcgctccagtcggcagatatctcatattattccccctctcccactgcaaatgcaacagcataacaatcagtattcgtaatggaaacatgtatttttacaataccggcagatactgccgcctcctttgcccctcgcaaaagattcacataaggtttgcctctctcatccctcaatacctcgatatctccaggacgaaatcctgaaaatccggttccaaatactttcgccacagcctctttgactgcaaaattgcctgctgctttctccatctgcccgcgaatcatctcctgttcccgcacggaaaaacaacgcgtaaaaaaagcctgctttccacacgctttccttacacgttctatttctatcatatcggttccaactccaatgatcatcgtttcttattcctttgcattaaagtaattatagcgatttacattgtaagataaacgcattaagctttctgaaagatgtacattttccacaataacattctttggaagatttagatcagtatgtgcaaagttccaaatcgccctcactccgttgtccacaagaagttctgccacttccactgctttcgtcttcggaatcgtaagtgctgcaatctcaatgtcattgttttgtacaaactccggaagttcttccatcattcgaatcggaacatcgcgaatcgtcattccttttaatgttggattaatatcaaaaattcctttcagcagaaatccgcttctttcaaatgccgcataatttgcaagcgcctgtccgagatttcctgcaccgatgatcacaatattatgtgtcttatcgagccctaagatcttaccaatctctgtgtataaatatttcacgttgtatccatagccctgctggccaaatccaccaaaattattcagatcttgacgaatctgggaagcggtcactttcattttcttgctcaggtcatttgaggaaatgcgttccactccattttccagaagttcgcctaaataccgatagtatcttggcaaacgtctgatgactgcctgagaaatctgtctttctgtcacaaatgttcaccatccccattgtttattacatcttattatataaaattgttctagcaaagtcaaacttttcatttctttttagttgtattttctttgatatccgctataattgaaaagagagtaaaggaagattctggggaaatggtcacattttttcagcatggaaataacaactcaacaattgatttaggaggaaacaacatggttttagcatgccataatctaaaaaaagcctttttggagcaagtgattgtcaaaaatggctcttttcatatagaagaacacgaaaaagcggcgttagttggtttaaatggtgccgggaaatcaaccgtcttaaaaatgatcatgcgagagattcccgctgatgatggagaaatcatccttgccaaagggaagaccatcggatatcttgcgcagcatcaagcgctattgtccggcaacacgatctatcaggaagtagaaagtgcaaaagccgacctgattcagatggagacacaacttcgccgcttagaagaagaaatgcagaaaaaaaatggggaagaacttgagcagcttttgcatacctatcacaaattaagtgcagcctttgagcgggcagatggatatgcctacaaaagcgagattgtcggtgtcttaaaaggtcttggatttgcagagacagagtttgacaaatgtgtggacaacctctccggaggtcaaaaaacccgagtagctctagggaaactgcttcttaccaaacctgatattttacttcttgatgagcctacgaaccacttagatctgaattctatcgcatggcttgagacttatctctcaaattatccaggtgccgtacttttagtctcccacgaccgctatttcatcaaccgcgttgtaacaaaagtcattgaaattgaatttggcgaaattatgatgttcaacggcaattattctgagtttgccgagaaaaagaaactgatccgggaagcgaagttaaaagaatatctgaatcaacaacaggaaatccaccatcaagaagaagtaattcgaaaacttcgttctttcaatcgtgaaaaatcgatccgccgtgcagaaagccgggaaaaaatgctcgagaaaatggatcggattgaaaagccattggaacatcatgccgaattgaagcttcatttagaaccgaccgtcgtcagcggaaatgatgtgcttcgtgtagaagggttaggaaaatcttttggcacacacacgctctttcaaaatatcaactttgaaatcaagcgtggagaacatgttgcggtcatcggggataatggaaccggcaagacaaccttactaaaaattttaaacgaagtgattcctgcagatcacggaacctttacacttggctccaatgtccatatcggttattatgatcaggaacatcacgttctgcacatggaaaagactattttcgaagagatttctgacgactatccgtcactgacaaatacagagatccgtaacactcttgccgcatttctctttaccggagaggatgtctttaaacggatcggcgatctcagtggtggggaaagaggacgggtgtctctcgcgaagctcatgttgtcggaagctaattttttgattcttgacgagccgacaaaccacttggatattgcctcaaaagaaatcttagaacaagcgcttaacaactacactggaacggttctgtatgtttcgcatgaccgctatttcatcaaccaaactgccacaaggattctggatctcgttaaccaaagttttgtgaactacatcggaaactatgattattatctagaaaaaaaggaagagcttactgccgcctacaccgaatctgccgcgcaaacagatgcttcctctgaagaaacagcatctgaatcgaaattagactggcaggcgcaaaaggaacttcaggcaaaagaacggaaacggcaaaatgatcttaaaaaattagaagagaaaattcaaaaactggaagaggcttccgctaaactcgatgaagagcttgcaaaaccggagtatgcaatgaactcaaaaaagctaatggacatcacaaatgaaaaagccgaaattgacacaaaactatgggatctttatgaacaatgggaatccctcgcggaataaatagtcatctggggtgccagccatcatgcttacactccgctctttcggaaactattcataaacagacaaacggaacgattgcaacacacctttttcttgcaatcgttccattttttataaaaccatatccacttctatttctcactgtattgagaaagtttctccgcgatttctttaataaacgcttcactgttcagcacgactggattcggaatcgatgtgatcatcgcaagatccttcgtcatctttcccaactcgatcgtatcgagcgtcgcctgctccaacttttctgcaaatgctgtcagttctttattgccatccagttctcctctctttttcaacgcacctgtccatgcaaagatagtagctaccgagtttgtagaagtttcttctccttttaggtgtttatagtagtggcgctgtactgtcccgtgtgccgcctcatactcatagtaaccatccggagataccagcacggaagtcatcatggcaagagatccaaatgcggaagataccatgtcactcatcacatcaccatcataatttttgcatgcccagataaatcctccttccgatttcatcacacgtgccacagcatcatcaatcaatgtgtagaaatatgtaatacctgcttcttgaaatttttcctgatattctgtatcataaatttcctgaaaaatatctttgaacgtatgatcatatttctttgaaatggtatcttttgtagcaaaccagagatcctgctttgtatccagcgcatagttcatgcaacttctcgcaaagcttgtgattgactcgtcagtgttatgcattccctgtataatacccggtcccgaaaaatcgtggatcagctctcgcatttcagtgccatcttcgccagtatagacaagttctgcctttccagcccccggaatcttcagctccacacctttgtacacatctccatatgcatgtctcgccagtgtgatcggtttcttccagttccgaacacacggctcaattccttttacaacgatcggctgacgaaataccgttccatctaacatagctcggattgtcccatttggacttttccacatctctttcagattgtactcttccattctggcagcattcggtgtaatcgtcgcacactttacggcaaccccatatttttttgttgcatttgcagactctactgtaaccctgtcctccgtttcattacggtattccaaccccaggtcataatattctgtcttcaaatccacataaggcaaaatcaaatgctctttgatcatctgccacaaaatcctcgtcatctcatcgccatccatctccacaagcggtgtcgtcatctgaattttctccatagtaagttcctccttccacagctccatccaaaacactcgagaaatattctgaatatctttttgtatttcaaattattctaaatattttacattttaatacagattatgtcaataattatttgctctttttcgttttgttagaagatttttattgcatagtatattaaaaatgcttttatagacaaaaacaaggatgttcataggaacacccctgctttgtctatgttttcaatataatttcacagaaacaatcgttagtcttcttttttgattttctgaagttctgcattgatatatgccattacagccatcatcttttcgtctccactgtttgcacccatatccattgccggacggtctcccataacttcaagcatcgatttcttaatattaattcccatcgtactgctgagaccatttaacagaacctggcatgcctctgtattctttaaaatatctttcacaagatctttcaaagaaaaatatccttctttaaattccattggacgtgctacagataaatctacattgtcaaaccagtttgttacacctgctactttatcatcttcgctttcttcaaaaatataagatggatttgcctctgcaaccttttccagagtgattgtatccgtacaatttccagcttttgccacaattgttgtaaatccttcctgcaacggtacattttcaaatgtaaacactttatttcctgcctgtttctcaattacccttccgccgatagaaagtgtaacttccggacaattcgtgtaaactttgattgtcacagtgtctgttgtacgctgcgcatagcgcttgctgcaaatatgaacgaattcttcctctgtccaatatgccttatacaggtaaaatgcatctttgcggatcagacgatcaattgtcataaggcctttgttgttacgtcctttgacaccaccttcatttcttgcatcacatccaaaatcaaacatattccatacatgtgttgcccaaagccacggacgttcctcaatgattttcgccatatgctcatggtacactgcctgaaattcttcgctgtaatctccaccttttggattatcattatgatatgttgtaattccttcgcatccatattcagaaattccgatcggtctttctgggtgcatctcatggaacgcatccagccatgcctcattatcttccagctttccgccataccatccgaaataatggttgtaacttaccacatcggtaatgtcattttgctcattttccatcggaagatgggacacttgggccattgttgtcatccttgtatcatccaattcatggacaagcgcatgtagatctttcagattttctaccagtcccggcacttctcctccaattgtaatctcatttgagattccccagaaacagatggatgggtgattaaaattctggaaaatcaattctctcatctggcttctgcaattttcgtgagcatccggatctgcgttcatcgctgaaataaacggaatctctgcccaaataataaatcctgcttcgtcacaaagatcataaaaatcctggctgtgctgataatgtgcaaggcggatagtatttgcccccacttctttgatcaacagaatatcttcgtaatgctcctcaaatgtcagtgcatttccaagatcatatctatcctgatgtctggatactccgcgaagcggcatactttttccatttaagaaaaatcctttttgcggatccactgtatattcacgaatacctattctcgtttcaatttcatccagtacttcattgtgtcgtaccaatctcgcagaaacggtataaagatatggatcttcgactccctgccacagatgtgcatcaagaagctctacagctacctgtgtctcctgtgtcgccggacgaactgcaaatacttttgtctctccatcttcatcataaatctcaaactctacacggtcaccttccaaaggatttgtcacataagaatgaatatctacaagtgcattctctccttggattttagaggaaactttgattcctggtgctccataatagtccagatcaaagtgagattcatttacaatcacgagattcacatctctgtacagacctccataaaatgtaaagtctgccatctgtggatagacatttgatttcggtgcattgtccacgcatacggcaatcagattttctccgttttcatctaattgctctgtgatatccgcacggaaaatgctgaatccaccttcatgactgcacactttctttccatttacataagccgcgcatacatttgctgctgcctgaaattccaggtaaatgcggctatgcggcttcactgtatatggccctaattcctttacataccagcaagctccacgatagtagtccgaacctccatcttgcccgtcatactggttccatgtatgtggaagatcgactacttcccagctttcttcgcacgcgatcggcagttctttctgctctttactgaaagaccatccttcattgatattaataatttctctcatgctgcttcctcctttttctttcaaatgacttactcggaaagattcttctgaaactcgttaattctttcttcttggtattttcctgaatatgttcctgaaaggaatttttccagtccctctgacaagaaccgctcccaggaacttttttcctttttcaccagaatcggatagtacagcactccgttgtcctccgccgctttctggtctcccggagcatccccaatcatcagtacatgggctttttcataccctttctgtaaaagctgaccgatacagtaagcttttgttcctgcatcctgcgccagcataatgtccgtatgctcaatcaggttatgccttgtccactcttctctgactgctcctgcatttgcagaagacacaatcgctacatctgctgcagcatgagcagctgcaagtcctgctttcgcaccttcaaatggaagattttcctcttccggaagatttttaattgccacattgacccgctctgaccactccagcgccatccgaagtgacttgctctctttttgagcaagcacttcctcaatcgcacggtttgaaagttcttttgttgtttctgtccaacgaagaaatgtctccagatcatcaatctgcacatcatcgtaggtttcctctgcctctttcaatgcgatcgcaagtcctttgaaccgattgatccctcttgtcattgtataaagatttacttcattccaacgtgcaagaagctcttgttcgtgagcatggagtccccagacttcgatcatacatgggccaaaacagcgaaaatgcttgatatccattgtatccattgcacatccgtctgaatcgacacagattaaaaagtcatgttttctttcaaaagaatcaaatatcgttgacatctatgcctcctaaaatccgaaatactccattgcgttattgtaacaaatattttctaccatttgtccgaggaattccatgtctgccggatattctccattctcaacaagagttccgatgtagttgcagaggatacggcggaagtattcgtgtcttgggaaagaaaggaaacttcttgagtctgtaagcattccaacaaatgcagacaggaggccaatctggctcaatacgtctaactgtgcttccataccgcgtttctgatcaaggaaccaccatgcagcaccaaactgtacttttcctttgcaggaaccatcctggaagtttccagccatacttgcaagcatctcattatcttttgcattcaggcagtaaaggattgtctttggaagttctgcgttgtaatccattgcatttaaaagtgcacttaattcttttgcatagcagatatcatcgatagagtcaaatcctgcatccggtcctaacttttcaaacattcttgtagagttgttacgaactgctccaatgtgaagctgcattgtccaatttctcttgtgataatggcttcctaaaaatacaagaacgtttcctttaaatttcttgatctcttctgctgtcagtttctcccctgccaatgcttttttaaagattgcatctacttcttcttcagatgctttgatgtagagattttcatctaatccatggtcgctgacacggcatccaacttctgcaaagtagttaattctctcttccagtgctttctttaatgtttcgatggaatcgatctcatatcctacaacttctgaaagttttgcaatatattctgcaaaatcagccttgtcgattccaagcgctttgtccggacggaatgtcggaagtacctgaatttcaaatccatcttcttttaatgctttgtggtatctcagatcgtctgccggatcatctgtcgagcaaagtactgtgatattcatcatgcggagaagatttctaacagagaattcttttgtattgagcatttggttacatttttcataaatctctttctctgtcttcgggcttaacggctcttcaattccaaaataacgctgtaattccagatgtgtccagtgatacagtggatttccgaatgtatatggaattgtttcagcccatttgctgaatttttcctggaaagaaacttcctttcctgtcacatactcttccttgattccgtttgttctaagtgcacgccacttgtagtgatctcccccaagccagatttctccgatgtcgttaaacactttatcttcataaatttcctgtacatttaagtggttatggaaatcacagatcggcatttttgccgcatggtcatgatataatacttttgctgtctctgtctctaagaggaaatctttatccataaattttttcatttttattttctccttatcctatcttttttgtgcgctctggaagattgtatgcttgccaaagcatctgtcatttcactttttctatgataaagaacgccaatgcagaaaaacagactctgcatgttcttctgcattggcaatgtgtcttttctatctgattactattatacgcctgagtaagcagagaaccctccgtctaccggaattactacaccatttacgaagctagaagcatcttcgcacattaagtataataaagtaccgatcaactcttctgatttaccaaaacgatccataggtgtgtttcttaaaatcttctctgtacgtgctgtcggtgttccgtcatcgttaaataataatttttcattctgttttgaaacgaagaatcctggtgcgattgcgttgcaacgaattccaacttttgagaagtgtactgcaagccactgtgtaaagttagaaatagcagcctttgctccgctgtatgcaggaatctttgtcagtggtgtaaatgcattcatgctggaaatgttgatgatgctcgcaccttttttgtccatcatgtcctgagcaaatacctgtgttggaagcagtgtaccaaggtagtttaagttaaatacgaattctactccagatacatcaagatcaaagaatgtcttcatctgatttaaatcttctttgtggaagaattcattgtctgttgttgctctcggattgtttcctcctgctccgttgatcaggatgtcacatgttccgaaatctgcaaggatcgcatctcttgctgcttcgatgctctctctctgaagtacattacatgcatatccttttgcgattcctccgtctttgacgattgcttcagcatttgcttttgctgcttcttcgttcaggtcaagaagtgcaactttcgctcctgtctcagcaacagctgctgcgaacatagaacaaagtacaccgccggctcctgttacaactactactttatctttcagatcaatttgaaatggaagtttcatattttcccacgctccaatctttttattttttcgaactatttgtctaatttatcaagggtttcccagattcctgtcatatacattgcacctaatgctctgtcatacagtccatatcccggttttccagtctctccccagatcattcttccgtgatccggtcttaaatatccttcaaatccagcatcgtgatatgcttttaatatttcaacgatatctaatgatccacacggagaatagtgcgcactctcctcaaaggatccgtcctccagaatcttaacatttcttacatgagcgaagtgaatccgtcccattgccgcatatttctttaccatctctgcgtagttgttaaatgtcgcacatccaagacttccgctgcagagtgtcagtccgtgatgtttatcatcatagagacctaagaaacgatcaatgttctcctcgcatgtaatgattctcggaattccaaaaatagaccacggtggatcatccggatgaattcccatgttgacatcaaattcgattgctgtcggcataatttcgttgatgaaataagccaggttctcccacagaccttcttctccaagatctttgtacgcctggatcagctctgccatctcttctgttgagtaggaagaatcccatcccggaagagctaattttgtcggatccatctgcgctacatgctctttgtagtatacaagtgcgttagatccatccggaagttctctgtcaagctgtgatcttgtccagtcgaatactggcatgaagttgtagcaaatgcacttcacgcctgcttttgcaagacgtctgatgttctctttatagttctcgatatactgttgatagtttcctcttctcaacttgatatcctcgtgaaccggaacactctcgattacttccatctcaagtccttttgcttctacctgagctttcaatttcagaatttcttcttccggccatacttctccgacaggaacactgtaaacagctgtcacgacacctgtcattcccgggatctgacgaatattgtccagagttaccggatcgtctggtccataccagcgaaatgtcattttcatacacatttctcctttcgtttcatttatatattttattatgcgttataaggaacgcaaaatatctcttctcgtaccgacaggcagccatatcgctgactgccggatgtatctagcgcaaattattttgctgctcttttatctaattcttctctgatttcttccagtttcttcttagaaagaggataccagaaaatcaagatcaatgcaatgataagatatccgattgccggaacacctgttgccaccgcataaatagagttctttacagcctctgtctggtcaatacctgcacctgactgatatccgatcagtgcaagcgcatatccgccaagtcctcctgcaagagcctgtccaagctttcttgcaaaagagtaaactccataaacagtaccaccatcttcagaacctgtcattacagtctggtaatcaatgatgtctgtgataaatgcccagatcatcaagttgaaaagaccgcttccaaggtttcctaataaaatgattccgcagaatacccatggatttttaatctttgcaacaaataagaatacatatactgcagatgcaaaaagtaatgccgcactagatgcttctttctttccaaatctcttagtaattttaccagaaaatggagctaaaatcaatgtacatgcagtacctaataaacttgcaattgacattgcctttgtatttttgaagtaatcctgatacagatatacgttcatagactgtgcaagaagcattgcaagaagtaatacgattgccgcaacaatgatagatacgagtgcacggtttccaacaagtccttttacaaggtcttttgcagaagccttcttttctactgtttttgtctctgtcacaacacgctctgtagaccatttgtaacagattgtgtaacagatgaatgcacatacagcgaaaataagtgagagaataaacatacgctccccaactaatacctgatttcccgcctcatcttttacgtatacgatcatcggcgctacaaatccaacgataactcctgcaagtgctgcacccacgcttctgaatgtagaaagctgtgcacgttctaccggatcagtagagattgcggaagccatagaaccatatgggatgttgattgctgtgtaacagaagcttccccataaaatgtaagttacaaaaatatagacaatcttcagtgcatacggaaggtttgctacccatggaataaatacaagtactcccgcaaggactactggaatacgcattcttctgatccatggacggtatcttccttcctttccaggtttggaactatctacaattcgtcccattccaatatctgtgaacgcatcaacaaaacgcgctactaaaaacaaagttcctaccacacctgcattgattcccaacacgcttgtgtagaacaccattaaaaattgactaatcagaataaagaagaaatcgttaccaaagtctccacacatgtaagcgatcttatctttgattccgaaaggttgattgttgtttgttgaacttgccattgtcatcctcctaaaatctttttctttcggcatgttttgctttttgttcctctcccagcaacaatcagatcttggtatacacctgtgtcactgtcggatgggcaaaaagacttttagcattcggtctgtcttgaccttgttattactttaacacatattttttttgagcgagagtagaattctcattgattttcgtactattttcatgtattttattattatatagaataattttaaggagatgagtatgaaacaaccgaatatttttgcattcctcacagaccttttgtacgctacactcaaagtgcactctgccgtcctgacacctccatttgaatctttggagcagattgacttcggactgcgcagaaagatttggagcgattttgactaccagactctactctacggagcaccaaatgtaacatttgataattctatttatttcatggaagataatttttattcacattatatcatttttaagcaccccgagattgccaacagttattattatgtaggtccatttctcacccgaactgcggatgatacctttctttcggaaattcttcagaaaaatcagctttccgaaaatatgcgtgattcgctccgtacttactataacacaattccacagttggaaatgcgaacgatgatcgccacactcaacacaataggcagttatctatacggtggcccggaatcttacctggtccatttcatcactgaaaactggggaacaaatgacgtaagctacgaatcttcttccacgccggaactctatctttccatggatgtcatggaagaacgttaccggatggagaacgaacttctagaagcgatttccagaggagaccggagaaatgcactaaaatcttttcacgcatttagctgcactcgctttgagaatcggacaaaagatcttctgcgtgatgctaagaatcggcttgtaatcttaaatacgctgtgccgaaaagcagctgaaaagagttttgtccatcctatctatttaaatgaaatttcgacatcttatgccttacaaattgaagactcttcttctgttgaagatttaaatgccttgatgctcgatatgatccggagatattgtctgcttgttcaaaatcagtccatgatgaattatagcccagtcattcgcaaagcattgaattatatccattttaatttgcatcatccactctcattaaaatcaattgcagaagtgctgaatgtaaatccaaactacctgtcaaccattttcaaaaaggaacttgaaattacattgacggaatttatcaaccagcaaagaatacacattgcagtgaaattattaaataccaccgatctgcaaattcaggatgtggcatggaatgtaggaatgaatgatgtcaattattttacaaaactgttcaaaaaggcggttggtgtaaccccaagctgctataagaaaaatatcaagcggaccacaccttatgataatcaaccttcatctatcacacagatttcaatataacaatggagcgggaatttttcaatcccgctccatctatcttttattcttctgtcgcaaacaatgcatttacaaactcatccggatcaaatttttgaagatcctcgatatgttctccgacaccaatatatttcaccggaatgccaagttctgactggattgccacagcaattccccctttagctgttccgtctaatttagtcaaaacaattcctgtaatatctgctgcttctttaaattctcttgcctgcgcgagcgcattctgtccggttgttccgtccaatacaacaagtgtttcacgatatgcttccggaaattcccggtcaatgatccgattgatcttttttaactcttccatcagatttttcttgttgtgcaaacgccctgccgtgtcacatagcagtacatctgcctttcttgcttttgcagcctgtactgcatcataaacgattgccgccggatctgctccttcctgacctccgatcatataggcatccgctcttctcgcccactcggtaagttgttcccctgctgctgcgcggaaagtatctgccgctgctaaaacaactttctttccttcttctcgaagttttcctgcaagttttccaactgttgttgtctttccaacaccgtttactccaatgacaagaacaacggaagtacgattttcaaattcatatgccgtatctccgatgctcatctgctctttgatactgtcaatcagaagctgcttgcattctgccggctccttaatatggttctcttttacttttgccttcagatcttcaatgatcttcatcgtcgcatggattcccaagtctcccatgatcaatatctcttccagttcttcatagaaatcttcatcaatacttgaaaatccattaaaaatgctgtcaattcctgatacaatgttatctcttgtctttgcaagtccagataccagtcgtttaaaaaatccttttttttctcccatatctatttcctcctacttttctaactcatcttccaaaagatttaccgacactaatgtcgatacccctttctcctgcatcgtaattccgtatagacggtctgccgctgtcatcgtaccacgcctgtgcgtaattacgataaattgtgtatgtttggtcagtttatgtaaatactttgcaaaacgcgttacattcgaatcgtcaagcgcagcctcaatctcatcaagaagacagaatggggatggctttaaattttggatagcaaacaaaagtgcaatggccgtcagcgccttttctccaccagaaagctgcatcatattttgcagttttttccccggcggctgtgcaataatgcgaatacccgcttctagaatgtcttcatcttctaacaattcgagcgttccctttcctccgccaaaaagctgtttgaatacactgtcgaactcctttgcgatctttgcaaactgttcttcaaattgtttccgcatcgcaatatccagttcttcaataatctgaaccaaagtcttttctgcctctacaagatcatcatgctgtccttttaagaattcgtagcgctcaagtacatttttgtagtcctcaatcgcattgacattgactgtgccaagcgctttgatctctgtttttaatctttgaatttctttctttagaagcacaggatcaagcagctcttcttttctcatttccagtgcatgagaataggtcagttcatattcttcccacatgtaatccatcaacttttcagtctgctcttccaaagcagtctttttgctgtccaagcgaaaagtttctttgtccagatcagaaagatgacgggataaatcttcccggctctggaaaatttctttctgtacaagctgcagtttctctttctgctccatataagacgccagttcctcttttgctgcatgaagttcttcactcagctgtacgatcgtttgacgtagttttaaaatctgcccttcccgctccgcaatctcatttgccgcatgttcttttccggcttgaagtgtttcctcctcgtgtgatctgcgaaacatttcttcttccattcgtttcacattttcctgcaaaaatagatttttttgatccagtgcagcactctcaagatgtgctgcctctgcgcttttcagatagattgcttccttctctttcttctgctcaacttctttctgcaattgttggattctgcgctgaaattctttctcaagtaattccgacgtttcaagttccatctggattgactctttgttttcaaaaatttctgccatctgacgttccagccgcattccctcctgatgaatatcggtaaatgcctggctcgtttctccctgtcgctcctttgcctgtgcaagattcatctttaccgtattttgtttcacatacaggttttgaagaatttctcgatttttttcaagatctgcatagcaagctgtccgcttctctttatcccgaatcacagcagattgcatctgctgcatctcctgatacagccttcttaccgctttctcatactcttcaatctctcgccttctactcaaaagattgcttgtatttttaaaagatcctcctgtcatggaaccgccggggttcatcagttctccttccagtgtcacaatccgcaaagactgtctgtattttcttgccagtgcaattccatcctcaatggtatgaacaacaactgttctgccaagtaagtgatcaataagcttttgatacttaggctctgctgctaccagtgtgcttgcaagtcctataacccctttctcttgtaatgcctctggttgtcgaatcccggaggttccattgattgcagtcaatggtaaaaaggtcgcacgtccgtacttattccttttcagaaaatcgatcatgcgttttgcagtctcctcacaatccgtaacaatattctgaatgttaccgccaagcgctgtctcaattgcgatctcataggtcttatcaactttgatcaagtccgccacaaccccaagaagccctttttcttcctcttttcgttccataattttgcggatacttcctccataaccatcgtaccgctccgtcaagtttctaagagattccagtcttgacttctctctgtggaatgttgtctgaccgatctgtaattgctcattttgatctttcagctgtttttgaagctgttcgatctcatcttccagacgattgctctctgcctgatgtttttcgatttccgcctggactgcaagaaaatcttcctcatatttctttaattgtgcttcctgttctccggagttgcttttcatctcgatcagtcgctgattcatctgcgcccgctgaacttttgtctgctccatcatcgtatcataatgttgcagcttcgcttttgttacagcacgattttccaataactgcatcgtatcatttttctttttttctaccgccacaagaagttctgcgatctgcgtctggatttcctttagattttcttctgcctgacgctcttctatctttgcgccagaaatcttttctcccaattgttcctgctcttttgcaaatgctgctttctgttcctgatactcttttaattcttttgcaattgccagaagacgttgatcataatggctatcgctcatcttcgcagtccggatctgttcctccaatacctggatctgactttccgcctgctgttttgccaatgttttttcatctcgctttgtgcggcacccatccatctgcaattcagcttcaacaagtttctgttcttgtttctcataggcatgtttcaacgcttcctgcttttcctttgcttctgtcagttctctgttggcatcatcaaaagatcgctgagcggtttccatctgttctttcagccgaatcgtatccattaaaaacatattaatatcataaatttttaattcttcttttttcttcagatagattctcgctgtttctgactgccttctcagtggctccacttgtttctcaagttctgacaaaatatcattgacacgaacgagattctgtctctcgtcttccagctttctgacagaaagatattttcgtctcttaaatttgacaatccctgccgcttcatcaaaaagctctctccgctcttccggctttccacttaaaatcttatcaatctggccctgcccgatgattgaatacccttctttcccaatcccggtgtcataaaaaagctcattcacatctttcagcctgcaagcagttccattgatcagatattcactttccccagaacggtataactttcttgtgacagtcacttcatgatagtcaaccggaagctgatgatccgcattgtccaatgtgattgcaaccgaagcataacttaagggtctgcggttctctgtccccgaaaaaataacatcctgcatcgatcctccacgcagctgctttgccctctgctctccaagcacccagcgcactgcatcagcgacattactttttccacttccatttggtcctacaatccctgtaattccattatggaactcaaacaaaatcttattcgcaaaagacttaaatccctgcacttcgatactttttaaatacatcttccacctactgttctttctttctcagcatcaaaatcgtctgatatgccgcctcctgctcagaagctttttttgttcttccacttccggttccgtagcattcctctccaatgtaggcagacgttgtaaaagatttgttatggtctggaccttcctccttttcaagcacatatcttacattttctgtaaatttcgcctgaaccatctcttgaaggatagtcttgctatcataaaagagctttttgttttccagatctgacaaaataaatttttgaatgaactcttttgcactagcaaaaccaccatctaaataaatcgctccgatcaatgcctccacggcatccgaagtaattgagtctcgctgccgtccaccagttgcttcctcaccttttccgagtaaaagatagctgcccaacatcaattcctttgcaacaaatgcaagcgcaggctcacagacaatacttgccctcgttttcgtcaattcaccttccggcatagaaggattgtcaaaaaagagtgcttcactcgttgtaagttctaataccgcatctccgagaaattccaaccgttcgttgcagtcttgctttttcatatgtttttcatttgtataagaactgtgcatcatcgccttttgaagcaattcttttttctgaaatgtataaccgatttttttttctaattcctttaatctctgcattctgattctcctctgataaaacgaaaaagcccggatgggctttctcatttataaaataatagaaatatcgcctgctgttagtttgtagcattcttgatctgttctactgcatccccaactgttacaatgctttctgcatcttcatttgcgatttcaatgtcaaatgcttcctcaattcccataatgatctggaaaatatccagcgaatctgctccgagatcatctacaaaagttgtatccattgtgatctcatccggatttacatttaatacgtccacaataatttcctgtaatttttcgaattccataacttgatttcctttctgctattccacttgatttttaggatgttgtttcgtctttttgcttttcttctttctgaatgtgctctctgatcttctcattgatcttctgttctttgaaagtcacacactgtatgatagaattggaaacttcctttgcagaagaacttccatgcgtcttcacgacaagtccattcaatccgagaagcggtgccccaccatgttcactgacatcaaatgatttcaatgtctgcttcaaagctggttttactaacagtgcaccaatcttacttctcaatgtagacatcatccctttttttatctggcttgtgagcgccgctccgacaccttcgtataacttcaagataacattcccgacaaacgcttcacagacaattacgtctgccatcccatgtggaatctctcttgcttcaatgctgccgataaaatgaatatccttacatgcctttaacagtgggaatgtttcttttacaagtgcatttcctttctcttcttccgcaccgatattaacaattgcgactcttggcttcgctattcccatcacattctccatataaacagatcccatttttgcgaactgcactaaatgtgacggtcttgcatccacatttgccccacagtcaatcaaaagagagacgcccttttctgttggaatcaacggtgcaagcggcggacgctccacgcctttaattcttccaacaatcagttgtcctccgacaagaactgcaccagaatttccagcagagacaaaagcatctgcctctcccttctttacaagattcatcccaacaacaatcgatgaatccttcttcttgcggattgccataactggcggctctgccgtctcgattttttcagtggcgccgacaacctcgatctgctccttcggatatgtatacttgtcaagttcctccctgaccacagcttcctgtccgacgagaaaaactttaatgtcctgacgtctgctgacggcatccacagcacctttcaccatttcaccaggtgcatgatcgccgcccattgcatccagaactacttttgttaaatcagccatattcattcctcccagcattactattaataatattactagacatctctgcaaaaatcaatataattttttgtacttccctctatcacaaaaatcgctttatgtttacccataaagcgattttttgtcacaggatcgtttcgttctctgtctgttttattttctttttctattcctagattaatctaaattaaaccagtcagcatatccaagtttttccaggtttgctttgctgatctttaagctttcaaatggatctcttccataagttgcatcctgctcgatcaagaagtactcgcttcctcctgcaagacctgcttcgatacattcttttaccggaagagaaccttctccaacttctgcaaattctacattgcttgtaaatgcagccataaatgtttcaggatcaaattttccttctggaagttttacttcaccgattctgtaatcttttaagtgaagcagacggatgcgtccgtcatatttcttaataaattctaccggattttctcctcctctgtgaatccagtggatatctaactcaaatcccatatgttttgtattgttcttgatgatgtctaataagtattctccatcatattttacaaactctacatgatgattgtggtagtataaatcaattccatgttcttttaatcttccagcaacctcatctgcacgttttacaaaatcaagcgctttttcgcggcttcccatacatgtcatcggaagcataccgatacgaagcatatcgcagtttaatgtcttacaatcagctacgattttgtcaaaatctgttgtaaggtattctcctggcattcctggcatcatcggctctaatgctgcgctgagcgctgcaatcttaattccgaattcttcgcatgcttttttcattcctgctacgttttcttctgtcatcggaacctgagatacttccacacagtgatatcccagctctgcacacgcttttaatgttccatatgcacctaattctgcaattttatctttgattgtactcatctgaataccaattaatccttttttcatcaatgttcctcctacttataaaaacaatccgttatcttctttcgtcatgacacagcctggtaaaaatgatcttttgcataagacattttatcgcacaggcacataactgtttgttcttccagactcctggatcgcatcaatcaactgaatgctcatctttgcatccttcactttgatataattatctgttccatcctcaaggcatttgtagaatctggcaatcagtttactatggctcgcaccataataaaacttgcttccaggcatcttctcatcctcgatcagttttttctgggtaccatcctcttgcacttcataaagtacattatcccgaatcagaaattctccttgttcgagctgaactgcaatctgtacagattcatttttatggttagcgtttgttgcaaaaaacagacctcttgcaccattttcatattccagtctcgcagtcacagtatcttcaacttcaattccataatctaaaagctgacttaccgaagcatgtacccctttgatagttccaccaagaaaatataaaagatccagtgtatgcacagactgattaatcatacatccgccgccggcagtttcccatttcccgcgccacggtttgatatcgtaatactcctttgcgcgataccatgggacaattcctcttgttcctgtaacttttccgtattttccactgtcaatcagctcttttaacatctccacactctcattcaagcgattctggagacaaattccaatatgaagctctggatgctctgcttctaattttacatattcttccgcttcttttgtcgtaagcgctaccggcttttcacaaaatacattgcatcccatctcagctacttcttttgcaaccggatagtgcaggtagtgcggcagacagatatggacacagtccggctgtgtctgttttaccatttctttgtaatctgtaaagaaagggacaccttccggaagcccttgattggcctccggattgatgtcgcacagtccgcagagtgttatttctggattcgcaagaatacccgcaatatgaatttgggaaatatcccctaatccaatgatcgctgctctcttcatcctaactcctcccattttcaattgtgaaattaacgtgttgggaattttccttcctctgcaattttcttatttaattcagcaagatatacatcttcgtctacaggaagttctacttcttttcctaaccagcttgacagaagtgttgcatttgcaaggtttactccattgattccgtctgctccaggagctaataacggtgttccttcgatgatgtgttttgcaaaatcttccataacagttgtgtgctgtactccccatccatctgtgttctcaaatgtttcgatgtcgtacagtccgtctgctcctgaagaatttccctgagtcagttttacaagttccatcatagacattgtatcatttaattctttttctgattttttcagacggtatacagttgctttcttgctgtcttccacaacaatctttccaccgtctaagtcgatctcaaaacggtctgttccgattggatcatgtgtacatgtgataaagcttcctgttgctccgtttggatattctgtaacgattgttacatcgttgtcaacgataatatctctgtgagctccgcagatgatctttgcatatactttgcttggaactccacacatccactgccataagtctaactgatgaggagcctgatttacaaggacacctccaccttctccgccccatgtagctctccagtcgctctgacggtagtagctgtccggacgccaccatgagttgatgatccagttagaacgacgaatttctccaagttctccggaagcaacgatttcttttactttctgatataatttatttgtacgctgattgaacatgattccgaaagctacctctgggtgagctgctgcacactcgttcatctcacgaacagattttgcatatacccctgctggtttctctacaagtacgttcattccatgttccagacagtaaattgcgatttctgtatgtaagtaatgtggaacagttgtgattactgcatcgactgttccagaagcaaccatttctttccaatctttgaagaaaggaacttccggatatttttctttgcacattgcttccttctcaggatcgatatcacaaagtgctcctaatgcacagtgcggtgggcattctggtgccggcattcctgggaatccaccctttcctgataaaaatcctgcatacgcgccaccttgcgcaccaataccaattaaaccaaatcttactttttccatgtttatattcctccttagtttgatttctctatggaatctaaaatatctattaaagcatgatactgcatggagtaaccttctgcaccatcttttgctttattttctttaataatattttctgcattctctgtctcaagagactgaagtgcatcaaacagtaccaggtgcggctccaatgtcaggaagccttgataaccttcctctttgatcgctctttttaagatttctgcaatctttccttcacctgttccgcaaagaacattctccttatctgttgtcacagcatctttaatatggatgtatgcgacatggtcacggagcaatttccagcattccattgtatcttccccgcactgtacgaaattcgcaaaatcaaataccgatttgaaatgcgggcttccaagcgcatctaaaatgattttgcatcgttctttgatatcaccataaatatctttttcattttcatggatcataacaacattatattttgctacgatcgcatcaaacttctttaatttttcaataacaatctctttgtaatcatcggcattctttccttccggaataaagaagctaaacatgcgaatatatttacaatcaagcactttacagattttgcagagttcttccatctgcacaagctgtttttcaaatgcttcttcatcatctacgttaatcttaccaatcggagatcccagagaagaaacttttacatttgcttcccgcaatcttggcagaagcttttcctcaacctcttctgctgtataatctgcgatgcctttcccgtctgctgttctaagagaaatgtactccattccaagagaagtcacaacacgaagctgttcatcaaaatccggactaatctcgtctgcaaatccagaaattaaaatatgttccatttcttccacctctttctaaaattttaaatcaatacttttccattatcatccggctgcatcggaatgacaatcattagatccacaagcgtcatcgcaagcggaaaaccagtccagcatgtcaacaggtagataagcgctgttttatactgatgtgtataaaaacggtgtccccccatccatcctgtgagcactgccagccatatgtatgttttacggcttaccaacctcttttctctgctgttgagcaggttatgataccaccctgcgaacttttgcagcaaagtctccttttcttcaataccatatgcctcttttgttttctgtaattcattttctaactctaaaaactttttaatgtcttccggactgtccagtctttccttttttttcatgtctgttacctcccatgggaaagactgtcagccaggaatcctcccccttttaaccaattctttgtaaatattatttctttgtcattgcttttgctttgattgctgcaatttcttcctgaatctcttccatcttttcttttgtaagtggatagaatttcattgcgatcaagttgatgatccatccgatcaatggtgctccgataaagcatgccattgtcacccagaagattccgtcactgtatggtgtagactctaccggaagttcctttgtgaaaccgattgctgcaaacatcaacgcaacaaatgtagccgcaagtgatgagatgattttatcaacaaaactaaacagtgttcccataagtcccggaacatatcttcccgaacgatatacttcataatctgcacaatctgccgtcatcggaataacgatggatgaagcaatactcataaatcctcccagtacaatatacaggaaaataaatgtcagtccaaataagctccagttagctggagaccatgtagccggattcagcaaacctttgataccgtttacaattggaagcttcatagatgttggatcaccgagccacattaacaagaaaattccaagtgctgatgcgattgatcctattgttccgattacaagagctttcttttgccctaagtttcttccgatatatcccataccaaggattgttaaaagacaaaccggaatagatgttaatgcagatacagaaccgtaaagcgcataattaccacaaataacaccaaacattgtaatcataattgtcgcattgtttctcattgacatactaagtttgtctgaagaagctgatgcaacaagcatctgaatcgcacggttatgtgcgagtacatccacataatctttaaatccgactttcacaacttctccagttccaaaatattcctgacggtcttttctccaaagaccaattactgccagcactgcacaaactgctgcgatacaaccaaacagtaattgaaggtggtggaacatttcagggttatagaatgcagaaagtgttacttctccagcatcgtttgttacgttaaatttcggaatcaaagtaccagaaatataaatcggaataatcattgtcaatgctacaacattatacacagaatcgaacatagcaaagattggtctttgctttggatcgtttgtcaagcaagactgcgctgattttgtaacaacacactggcaagtatatccgatgatataaaccatataaactacaacaaaaaatggaaatcttccagcttttggaatactcggtgtcacattaaacaggataaatgaagatacaaacaaaataatctgtccgactacaataaatggtctatttttaccaaactttgtatttgtcttatctacaacaaagccaacaaatgggtcagtcacaccatcccaaattctcataacagtaacaaatgaacccgctaaaactgctcctactccgacaataccaatcagataataactgatatatcccatcaatgccatataaatatttgtggaagtattattcaatgcatagaatgctatctcccataatttcgcacggtggataccgttttcttctaaaggttttttcattcttattttcctctttctttcatttctcaaatcaatgaaaatactcaaggcaaatggtattttagaattccctttctattatttactcgtccctccttatgttgacattctaacatgtattcgcaaaagaaataagtaaaattttgtctgaaataaggaaaattgttatttttttgacttgcaatgtaaaaaaacaacagaaacccctttgtttctgctgcttttttgtagcttttgtatttccttattctacatttttgttgctgaaagcactttttcacgatattttgtcggagtcatcccggtgatctttttaaaaactttgctaaagtaattcacatcgcagattcccacccggaaagcaatgtcctggatttgcatagagcttgtgtttaaatagagaatggctatttctactctgcgctgattgatatattccgtcaccgtctgccccatctcctttttaaacaccgtggaaagataacttgcattcacattgagctcttccgacagatttttcaaagaaaccccttgactgatattcagttcaatataattcatcgcctttcgcacaagcggtgtatatttctgaaacgaataattttgtactaacatacaatatcttcgaatcatttcccgattaaaatggctgtactctgcacgagtgcaaactgtctctatcttttttgccaacgcacaggacaccttgtcaatcaaataaggatgtactcctcccatctcagccgcttttcgataaagcgtatttgcagtaatcaaaaaattcctgtaattcctgcttgcttctttaaagcgatctgcaatgcgaaaactggacattctggccgttgcattcagagccgcatcaatattcccctgggaaattgctttcataagatcattttcaattttgtagcgttcttcaatcaagttcgccgacaagtttgactcttcctgattttccggcgcagtaagctcttctgtccatgtaaagtgatccagataacagatttccagtttcccttcatttttgtatagcatacgtatgatggataccagacattctttaaactcttgatagtttggcagaatcggcattgcctgatagtattcctgaagttcccccatataaattgtagggattttatgtgtctgcaccagttcattcagccagttctcttctaccttttcattttgatatggtccgatcaaacagtagtttcccacacttctctcttcttccggcagacagaacatacagtattccgtttcaaaaacatcctgcaagacatacagtttcctgctctcacaagtgtcacagacatacgctgcaatcttctcataagtattctgattcccaaaaatctttctgattcctaaatcaaacttcgtgatgtcatcttcttttgaagaaatcaatgtcagatttacattaaaattttccagaaaggcttcaaggactttccataaatcaacctgcatatgcttcctcctctttctaaagcaaaaaaagaatggaaaaaaaggaggctgattcccaacctccttttcaaccttatcctcttattattgagcgataatttcttttttgttataagatccacaagctttgcaaactctgtgaggcatcattaattctccacacttgctgcattttaccaaattcggagcgctcattttccagtttgctcttcttttgtctcttcttgcttttgaagatttattctttggacaaattgacataggttacacctccttaaaattcttaaacacatcgcggataactgacattctagggtcaagacttgtgtcttcacagtcacaagttccctcatttaggttttgaccacatacgttgcaaattcctttacagtcttcacaacatagaattttcatcggccatcctatcaaaatctcattatagagtaatttgtctacgtcaagattatatccgtcaatataattcttttcttctgctgtttcatcgtgcgcttctgattgattcaattcgttcagattcacatctttctcaaactcaatcaaaaattcatacggcacttctttcagacagcgatcacacggaatcgaaatcacaacctttgttttcccggaaataagtacctgacggttcttcacatgccggatcacaaactctactggctctttctctataattggaaatctcccagcctttgtgcgaaactcttccagttccatctctgcattcagacgcatcgtcttatcttctgctgtcacgactttcaataggctgattatcataaaacaattctcctattcacacctcaattattatatcacgttcaacgcgtttgtcaatgcttttatatgacaaaaataagaaaaaagtctggcacagacttttttcttatcttccttccacaaaataatcagaaattaaactaaggcaactgtctcacgagcaatcgcaagttcttcatttgtaggaactacaagcacttttactttcgattctggtgtagagataatgatttcctgtccgcgttttccgttcagctcttcatcaatctcaattccaagatatcctaaatatttgcataccatcgtgcgaacgattgctgagttttctccgattccagctgtaaatacgatattatctactccgttcattgcagctgtatagcttccaacatattttgctactctgtacgcaaatacatccaacgcaagctctgcaatttcatttccgtctgctgccgcttcacttaaatctctgaagtcgcttgataagttattagaaagtccatatactcctgattttttattcagtacgttcataagtccggcaatgtcaagattttctttctttgcaaggaattccatgattgcaggatcaatgtctccggaacgtgttcccattacaagtccttccaacggtgtaagtcccatagaagtatccacggattttccattttccactgcacagatacttgctccatttcctaaatgacatacgattgtctttgtctcatcgtaagcttttccaacgagttctgcaactctctttgatacaaagctgtggcttgtaccatggaatccgtagcgtcttactttgtatttctcataatactcatatggaagtccatacatgtatgctttgcttggcattgtctgatgaaatgctgtgtcaaatacagctaccataggaactcccggcattaattcacggcatgcattgattccgatcaggtttgcaggattatgtaatggtgcaaggtcgttacattcttcaatcgcctttaacacttcgtcatcgatcactacagaacttgcaaatttctctccgccatgtacaacacgatgtccaaccgcattgatctcatcaaggctctttacaacacctgtcttctcatctgtcaaggcatcgattacaaactgaatagcctctgtatgtgtcggcattgccttatcagatgttgtcttttctccaccttctggctgataggtcagctttccgtcgattccgattctttcacagagtccttttgcaagaactccttctgattctgagttgatcagctggaatttcaaagaagaacttccacagttgattactaaaatattcatgtttctttcctccgtttggttatgatattttattttaacagaagaaatgctaccacttttacatttctcctgtctaatgcacttttattctgctgcctgagcctgtactgctgtgattgcaattacaccctcaatgtctgctgcgctgcatccgcgtgacagatcattaaccggctttgcaattccctgtgtgagcggtccatatgcttctgcttttgcaagtctttgcacaagtttgtatccgatatttcctgcatctaaatccgggaaaatcagtacgttagcatgtcctgccactttgcttcccggagcttttgattcaccaatttccggaacgattgctgcatctaactgaagttctccatccagcattaattctggagctgcctcttttgcaatctttgttgcttctacaactttatcaacatctgcatgttttgcacttccctttgtagagtgggaaagcatagcaactttcggttctgctccaactaatgtacggaaagattctgctgaagaaattgcgattgctgcaagtttttctggatctgggttctgctcaagaccagaatctccaaagataaatgttccgtgttctcccatctcacagtctggaacaaccataacaaagaatgcagatactaattttgtgcctggttttgtctttaagatctgtaagcatggtcttaatgtatccgctgtggagtggcatgctccggataccataccgtcagcatctcccattttcaccatcattactccataatataaataatttgtcagaagaatctcttttgcctgctcctctgtcattccttttttctgtctcagctctacgagttttgcaatatatccagctgttctctcatctgttgcagggtctacgatcactgctcccgtaagatcaaatccagctccattcttctcgatctcttccttgcttccgacaagaatcagatttgctgtgccttcttttaaaacagcttctgccgcttcataagttcttttgtcttctgtctccggaagtacgattacttttttgtctgcttttgcttttgctttaattacatcaataaatcccatgatttatgacccctttcatttttctcatatatcttattatagcgcaaatgctttttgtatacaagctttgttaattatatgtcaataattctcattttttgctaatttacactaatcttccgaaatttttcccaaattagatatgaaaaatccttgtcacaatcgcaaagtacacaagaattgtacctgtatccactaaagttgtaatcagcggcgctgccataatcgccggatctaatctacacttttttgcgaccagcggaagaacacaccctactgtcttagaaagcaggatcgttgcaatcattgtcaatccgatcgcaaatgcaagaagcggatcgccatacataatgatcacgcgaactccattcaccatcgacagacaaagtcctacaagaagtgctacccgtatctccttgaacaacactcggaagatatccttaaactcaatctctcctactgtcagaccacggatgatcaatgtagagctctgtgatccacagtttcctcctgttcctgtcaacattggaataaacgtatttaaaatcggcatcactgcaagcgctgcctcaaaatgtcctaaaatcaaacctgtgatcgttgccgagagcataagaaacaacagccatggaaaacggtttctggcatgtttccagacagacgtaccaaaataagactcctcattcggaaccacacctgccattacactcatatcttctgtcgcctcatcctgcagaacgatcatcgcatcatcgaccgtgacaattcctaccatgcacatctcctgatccaacacgggtatcgcgatcagtccatatttgtgtattgtatttgccacatcttctttgtcgtctaatgttctgacaaacagcgggttggtctccatgatttcttcaatcaccttattttcacctgttgtcagaagatctttgacatccacacttccaatcagctttctcttttctgtcacataacaagtatagatcgtctctttattgattccgacctgcctgatttttaaaattgcttctgccaccgtcatctcttttctcaaagcgatgtactctacattcatgatacttccagcgctgtcatccggatactggagtaacatattgatctgctttctcgtctcctcatctgtcacaagcaaaagacgatccaccacatttgcaggcatttcctccagtacatcgaccgtatcatcaatatacatctcttccatgacttcctgtaattccgaatccgtcagtgcatcgatcaacacttgacgcatctccgcattcatatacgaaaaagtctctgctgcctcctcttttgggagaagcctgaaaatcaatacaacctgtttatctgtcaactcttccatgatctctgcgagatccacaggatacatatcttccaactccagcttcaactgtttaaaatcacgctgttcaagtagttcttcaattctttcttctggcatatgcaccctccctcttctcttttttaccctgctttaaataaatcgcactaatttaagtgtatcgacttctccctcgattgtcaaacaaaaaatattatagtataattctgaaatacgattatagaaagggagaaccaacaatgaaaatcgcaggtcttatcaccgaatacaatccgttccacaacggacatctctatcacattcaaaaagcaaaagaactgacggatgccgattacctgatcgtcatcatgagcggagacttcgtacagcgcggcggtcccgcaattcttccaaaagatgtccgcacgcagatggctctccaatgtggtgcttctcttgttttagaacttcccgtccgctatgccacaggcagtgcagaatttttcgcctttggggctgtatctcttctagacgcgcttggctgtgttgatttcctttgttttggaagtgaatgcggtgagattgaaaagcttctttcgctcgctcaatttcttttggaagagcccgccagtttcaaagaagcactccaggcatcgctaaaatctggcctttcttatcctgcagcccgaaaaaaagcagccttgcagacactcaacgaccaagcgctctgcaatattttaaatgaaccaaacaatattttaggaattgaatacctaaaagcattgaaacgacgaaagagccccatccgtccactcacgatccagcggcaaggagcacactatcatgacgctgttcctcatgaaacttttagttctgcctctgcaatccgcaaactttttctctcccaaggagaagatgccctttctacccttgtcgggcatgttcccgagaccgtccatctactttgcaaagaggcatataacattcgcttcccagtgtgttccaacgacttttctctcttgctgaaataccgactgctacaggaaactgcagactccctcgtgcattggcaggatatctcttcaccgcttgcaaaccggatcatccgatgcagagatcagttccaaaactgggaacaattctgcgagctgttaaaaacaaaggagcttacctacacgcgcatcagccgtgctcttctccatgtctgtctggaaattccggaccctgataagagtgttccccctctttatgcgcgtatactgggattccaaaaatcagccaccccgctcttttcactcctgaaaaaggaaagccgtatccctctgatcacaaagcttgcttctgccgcgctcacatccaaagctgccgaagatatgattcaagaagacgttcacagcgctaatctctatgaatccgtcgtcacagacaaatttcagaggccttttcacaacgaatacagacaatccattatacgcctttaaaaggcaaaaaacttcgcccagccaggctctcaaatctttttagattctcagttgccttgcagggcggagtttttttactatcattcttcctctattcgtattattttcccatcacttttgtacatgcgactgccattgctcccggcccgatgtgacacgccacactcagagacaatttgtccatatgtacctcatatcccggaaatctgctctcgatctcttctttccatttggcagcatcttcctctgaacaggtgtacgcagcctggagatataccttttcctttccaaaacgttccttaatgtctttctccagcgcatctaacatcgctttttttgcctgcttccatccacgcacttttgcaaacgcatcgagtttctcgccttgaatctggagaacgggttttaaattcagcaccgttccgattgccgctgccgccgcagtgatccgccctccctttttcaagtatttcaaggtatctacggtaatgtaaatactcgcatccagtttttcttcctccaaacgctcctggatttccactgcgctcttcccttctgctgcaagttccattgcatccaaaacagactgtctctgcgtcacagaaattctctggttatttactacgcgcacccggccgtcataatctgctgcaagcgccatcgcagtctcacacgaactgctcaatccactggacatcggaatgtgtacaatctcctcgtactcttccaaaaggcgatcccataattccattatttctcccggcgccggctgagaagtcgaaatatcagaatcttgtgtcaaatgctgataaaattcttcctgcgtcagcgtaatgtcttccagatataatttcccatctataaaaaacggcatcggtattacttctatccccagacgttttgcctgcgcctgcgtaatcccgctgttactgtctgttacaattgctatctttttcatacatctctccttcttgccattaaacagtgataatatctgatggcatatctctccttgcgacttccatcctgaaatctcccggtttgtacggaacatcacttaacagcacttccattttcaccgtctcatatgccagttccgaataattattttctttgctcaaatgtccaagcaggacatgtttcaaattctcatgcaaaatatcacagagaaggcgacctgacaattcatttgacaagtgtcctcgatttcccagaactctctgcttcagatagtacggataactccccacttccagcatatgaatatcatgatttgcctctaaaagaaccgcatccaaattttgtagctttgacacggtatattcatcataaatcccaagatccgtcgccactgcaaccgattgcccaccttgctcgattcggtacccggacggctcatttgcatcatgagagatcgcaaatgcttccacactcaaatctccaagcgtaaatttctgatctacatcaatctcatgaaacagtccgtcaggaatctctccaagttttttgtattccctgactcctcgaatggttcctggtgtagcatagacaggaatctcatattttctgctgaacacaccaagtccctgaatgtggtcagaatgttcatgcgtaagtaagattccatccagttcctctcctttgatctccagatttttcaatccttcttcaattcgtttcttactgattcccgtatcaatcagaagatgcgtatgatcacttcccacataaatacaatttccactgctcccgcttgctatactgcataatctcatcgtgactgtatctccattttttctaatatctcctttatctgtctctttgtttcttccaaagattcactattatcaattactttgtcgcacttctggaagaaaagctcatctggattctgattttgcataatctcttcgcaccgctcctctgtataccctctcgcctctttcaggcgctgtacgcggatacttttttctgtataaatataccagacctcatcacagatttcctcataatgctcctccaataaaagtgccgcctcaaaaatcaaaagtgttgtgcccttcatacgttctgattggatccgttctaaaaaatcccgcttaacttctggatggatcatctgattcaaaaactgtaattcttctgcatctgcaaatacaatcgctccaagcttttttcggtcgatttctttttcgtcatcaagaatctccgacccgaaatgttcgacaattctctcataacagcgctcccccggcatttgtagtttatgcgccatcttatctgcctcgcagacagtcgcctgataatttttttctaaaaacttcagcacttcacttttcccggatccaacacctccggtaatcccgataatcttcatgctattttgcctcataccagtttcgtcctgtgtgcatgtccacttccagcggaacatccagctgtgccgcctgctccatctgttccttcagaattttcttcacatcttccacttcttcttcatatgcctcgatcagaagttcatcgtgtacctgcaacaccagtcttgatttcatctttcgttccgtcaattcccggtgtactccgatcattgcaatcttcatcacatctgctgctgttccctggatcggagcattcattgccacacgctccccgaaagaccgctgcataaagttgcttgatgcaagttccggtaccggacgtcttcttccaaacagtgtgacaacatatcccatctcttttgcatgggcgactgtgtcatctaaaaacttcttaatccccggataggtctcaaaatagcgctcaatatattccgaagcctcttttctcgtaatacttaggtcctgactcagtccaaaggagctgattccataaacaattccaaagtttaccgccttcgcatttctccgctgaagttctgtcacctcatcaaacggtgtgtggaatacctgagaagcagtaatccggtgaatgtccttcgcttcgcgataggcatggatcaattcttgatcccccgagcaatgtgcaagaattctaagctcaatctgtgaatagtctgcatccacaaatacatacccctcttccggaataaagactttccggatcagccttccaagttccatccgaaccggaatgttctggagattcggttctgtactgctgattcgtccagttgcagtgatcgtctgattaaacttaccgtgaattcttccatcggcacagatataattcgccaatccatctgcataagtcgattttaatttcgtaagctggcgatactctaagatcttctcgacaactggatattccggtgcaagcttatcaaggacatctgctgccgttgaatagccggtcttcgtcttcttcccatgtggcaatttcagtttctcgaataaaatcacgccaagctgctttggcgaattgatattgaacgcttctcctgcctgcgcataaatttccttttccaactctacaatctttgtcccaagctgctctccataaaaacggagtgcctccgcttccacgcgcacaccagcctgttccattgcaaataaagtaaacaaaagcggcatctcaatggtgcggaatagttcttccgtcccgctctctttcattttttcttccagcacagctgccgccgcccagattacatatgcttcgtagcagcttctgcaatagccttctgtcttctcatcgataagcagtgacaaatactctgcggccacgtccagccacgtatagtcgctttttaacggatttagcagatacgctgcaattccgacatcaaagcacgactcaggatcttctatcctcacataggaaagcgctgctttcacatcaaacaatgcaacaaccgttgtcttagccaatgttcccacaagcgaaaacaggtcttccatcgtaagctctccctctgccacaatcgtgtagatttctttctcactaaaagcaagtcctacacttccaaatccggaagaatgagaaaacagcggtactgcatctttttcttctttcccgaagcttactccgacaaaagcttcttttcctgcacgggcaaacagttcttctgcctgctgtttatctgtcacacggacaaatgcattttctatctgatttccctttgcttccacatcgaatctgccgagcagatttttaaactgaagtttctggaaatactcataagcttcctcggtatatagatttccgatttttgcctctgaaagttcgtaagaaatcggtgcatttacttcaatcgtggcaaggattttgctcatctgcgccttgtcataatgttcctttaatgcttttgccgcacgcggtggcttcagttcctcgacatgtgcataagcattttccacagacccatactctgtgataatctttgtcgcagtcttctctccaatactcggcactcccggaatattgtctgaggcatctcccatcagcgctttcagatcaatgaattcctgcggagttacctgataccttgctttcacgtccgcggcataataatcttcaatctctgtctttccctgttttgtctttggaatccgtattttgacatgatccgtagcaagctgcagtaaatctctatcccccgacaaaatcgccacatccattcctgcacgctctccgatccccgcgattgtcccaagcagatcatccgcttccaggccttcctgctctacaatttttatcttcatcgcacggagtacttctttcatcaccggtacttgctgtctcaactcctctgccattggttttctcgtccctttatagtccgagaacatcttatggcggaaagtaggagcatggacatcaaatgcgacggtcagatagtccgggcgctcttcttctaatattttaaataaaatattcaaaaaaccataaatagcgtttgtatgaagcccctctgcattcgtcagatcagggaccccataaaacgctctgtttaaaatactatgtccatctattaatacaattttttcactcattcttctctctccgtttcggtgtctcgttcttatttatcatacaccaaatcagatcgttttaaaagagattttattttttcatcaaccgggcgatcgttttttctaatgcttcaaacgcttcctctggatcttccaccaactgtaccgtctcttccatcggacacatgccatcctttgtcctgttctcaatatacggcacaagggtttcaaattgatatggaatctgatgcttttcaaatatactaacagcaccctcactcataactcttccaaatacggcttgaacttctccgagaaccgccagaagtgctgcagcctttccaacaaccttgtccgcaattacagatccttgaaatgcttttctgtctgcgcgtagctccaccataagcggcttgatcccgatggcatccgaacaccttaccgctccatcttccgataagattacacagcttttctgctcctctttcagaatcgtaaccgcattcctcagttgttcttcgatcttctgctccttactcctcacctctgtctcgttcaatcatccatcctcccttttttaatgtaaaatagaaaagtgggattaccgtgatctgaaggatcatccccggaattccagatacaatccctgccataaacgctcccatattggcaaacgggaaatggaatcccaaaagcttaacaccaatgatcaaggaacatccatacaacactcttccaaggatcatcgcgctgagcaaagtgaaatacacattcatttttctgataaaaattccagtgaaaattccgtaagccacaagttccacaagcataaaataaagtttaggtaccggcggcatcccggtaagcatagagcttacgagagggacaatcagtccaatcagcccgccatagcaaggtccaagcaagattccggcaatcatcacaggaagatgcatcggcaaaaatgccatgcccactccttgcccaaatacatggaatgcctgcggcagtacaagtccaacggcagtcaaaagaccgccgtatatcatcttttttgttctcatcaacttattcctaacagcagagttcgcagattacctgtgcgaaaattttagcgctgagcaccaactcatcgacaactgcaaattcatccgcaccatgcattctattatccgttcccggcatcgagcatccgaaagcgacacctctttccaagtgatgtacataagtacctcctccgattgccaggcattctcctttctgtccggtatattcttcatagcacgcaagcaatgtctgaacaagaggagaatctgccggaacatgatgcggcggattctgtgtctcatttaataatgtgatcccatcttcttccattctttcttttacgacatttaatacgttctctgttgtaccgcaaatcggaatccggctgtcaaagattccatccagtccatcttcatttaactctagaacactaaaattcattgtgagtttcccagaaagttcatcttccagattgataccaagcgcctccgcctgatgatctccggacgggaacatccgatgtaatttttctactgcatctgttgtactgcatgctgcaaatggaagcatacataataattccagaagtgctgtcaatgcattctttccttcttccggcttagaagcatgtgcgccttctccctctgcatggatgatcacagttccttctgattcctcacaagtaaagacaacgccagttttcttttgtacctgctctgccttctccagaatctctgcgctaccaattccaactacacttgcagtagcttttcccggaacaatgttgacgatcttgccgccagaaacacttaaaatacgtggagatacctcttctgtgtcccattttgcaacaaaatgtccattcagacttcccttctcaatattgatcaccgggaaatctgcatccggcgaaaatgtcatcggtgcttctttctctaccgcgtagtaatgtgcgatatcactgcttccacactcctcgtcagttccaagaatcagacgtacatttttgtttaatggaatgccaagttctttcactgcacgcattgcatacattgccgcaattgcaggtcctttgtcatcagcacttccccggccatacactcttccatctttgataactggcatgtacggttctgtcacgctccatccgtcacctgccggaactacgtcaagatgtgccaaaatgtccaactgcttttccatgtcgtttaaatctgctgttccgacatagttttcataatttttcactgtaaatccgtatccttctgccatctcaagtgcttctgcaagtgctttcgccggtccttccccaaacggacaatcgatgactgcttccccttttgtactattgattctgatcagacggcagatatctgcgagcatttcctctttgtgtgcgtctaaataagcttcaatctgttctctgtattgcataaatctcttccttcccttcttctgacttataatgaaatcgcagagataaactctggtattccgggcaatggcagctttcctgtcatatgccgcactttgtgtcttattatactgcactttgggggatactacaatcttttttaaaaatttcgctttgtttctcaatgcatacgacttctgattttccatatattagaataacaatatctttcaggagttttctatgttcaaaaaacagcatctgatttctgctttcaaactatgtttcttattcagcgccgcattttgtatcggcaccatgactgcccatttacagaaacaacagtctttgaaggcaatccccacagctgccgacggcaactggggactaagttttcccgaagaaggaaaaacaccaactgggaatgccacctccggagaactttcaaaatacaatgcattttatgctggaaatcccgataagaaaataatctatcttacttttgatgcaggatatgaaaacggaaatactgttccaatcctcgatgcgctaaaaaaacatcatgtccctgcaactttttttgtcgtcggaaattttctaaaagaaaatccggatttagtgaaacgcatgcaacaagaaggacacatcgttgggaatcatacatatacccatcctgacatgtctaaaatctctacaaaagaagcattcgacaaagagcttggagaactgtcgacactttaccagaagacaaccggagaagaaatgacaaaattttaccgcccgccacaaggaaaatatagcgaagccaatctacagatggcaaaagagatggggtatcacacctttttctggagcctcgcctatgtagactggtatcaggatcagcaaccgaccagggaagaagcatttgaaaaactactcggccgcatccaccctggtgcgatcgtcctcctccacagtacttccagcacaaatgcctctatcttagacgaactgctcacaaaatgggaagagatgggatatactttcggctctctaaacgacctgatccagacaacatagtttcattcacactcagatccccacatctcaacctgcctactgtttttctctgaaacaaattacttctttaactgaaaggcgattctttctgtgccgtctgccacttggatctttccacattcgacaaatccattcttttccagcaggcgctgcataggcagattcgcctcatgtgtatccactcgaatttcctcgctttgctcaatgctccattgcaggcaaaacatgcccgctccctttctttctccgctggatgccagtcggtgcaagacatgatagggagactggttcaaccactgtccatcccatattttctcataagttggatctggtccgccacacaggctaaagactgccacaatagcttcttcctcctcgcaaacgtactgacacccttgttcaatttcttttagaatcaattctctggaagggtaacccttgtcccattgtgtcgcatttccgttttttctcataaatgcacgtgcctgctcatatatcctcataattttatcgatttcttctgcttttcctcttctaatctgcatctgttcttcctttcttctcaaagaaataggaatgtgtctgacacattcctatttctgctattgatattccgtacaatctgtctttgaccatcgtccgacagatttcttactactgtaaccttgtctgtaccaactatcttgcagctttcttatgtccgttctctaccacatctgtccagccaagctctggctgataattctgtacttcttcactcttctttaaatcaaagtactttttgctggcaccgatcttatcacagatcttaaaaaatccgagttccaaaaggttaaagaacttatggaacggttcaattttgtaatctacatgccctttcataaaaagcgcagccacaattccagtcaatacaacagtagtcattacaatgatactctgaatatgattcaacattgccttcaaccccttttcttttcgttttctttattttaattctatttaccaaaatagtcaattatttttattatttatttatagttttctattatttttaattatctttctaaaatacactgttttctctaacttacaaattacatatgaccgcttgcgtcccccgattgcaagtgtttttctatgcaaaaaatccagactacttaaagtaatctggattttactgccgatggccggactcgaaccggcacggatcgctccgcatgattttgagtcatgtgcgtctgccaattccgccacatcggctcttttacctcggttcatctctcagaaccgagatttatcataacacacttttttttgaattgcaagtccttttttctattttttacttattttatcaatttttttccaatttcaaagcaatcaaacgtcgcatagtaatccgccggcgtctctgctctccggatcatctgtacacttccgtcttctttcaacaaaagttctgccgatttcaatttgccattatagttatatcccattgcaaatccgtgtgcaccagtatcatggatataaagcagatctccagtatcgatctttggaagcatgcgatcaatcgcaaatttatcattattttcacagagcgatcccgtcacatcatacttatggtcacatggcgcatcctcttttcccataactgtaatatgatgataagcgccatacattgccgggcgcatcagatttaccgcacatgcatcgcagccaatgtattccttatgcgtatgtttttcatggattgcccttgtcacaagtgcaccgtacggccccatcataaatctgccaagttctgtatagattgcaacatctcccatacctgctggcacaagtacttcctcatatacttttctgaccccttccccgatcgcatggatatcgttcggttcttgatccgggcgatacggaattccaattccaccagacaggttgataaatttaatatggactcctgtttctttctgcaacttcactgccacttcaaacaaaacttttgcaagcatcggataatattcatttgtcactgtgttgcttgcaagaaaggcatgaattccgaagtgttttgcccctttttcttttaaaatccggaatgcatcaaacagctgctctgtcgtcattccatatttcgcatctccaggattgtccataatatcattgctgatttgaaacagcccacccggattgtaccggcagctgatggtctccgggatatgtccgattgccttctccagaaaatcaatatgggtaaaatcatccagattgataattcctcccaacttatccgcatagacaaattcttctgccggagttgcattggaagaaaacataatatcttctcccacagctccgattgcttccgacatcatcaattctgtataagaagaacagtcgcacccacatccgtattctcttaaaatctgaattaaaaatggattaggtgttgccttgaccgcaaaatattctttatatcccttattccaagaaaaagcttcctttagtgctctcacattttcacggattcctctctcgtcataaatgtgaaacggagtcggatagacttttgcaatctcttccagttgctcttttgtcacaaatggtttcttcgtcattgtttcttctccttttctattgcagagaaggcatgacctgactgccgtcttgtcatgccctctcggactgttttattctaccacagcgattctcatcatgttggttacgccgtcgcgtgattttttgatcgttggggacggaattcccgctgtcattacgacaatatcacccggctccacaagtctctttgctgtcacaagatcgatcgcatcgttgcagatgtcctctgtcgtattgtattcaatcgattttaccggagtcactccccagtagatctgcattcttctcaatgtctcttcgcatggtgtcacgccaatgatgtctgccttcggtttgaatttggataccactcttgctgtcgccccggtcacagatggtgtgatgatgcattttgcagaaagattcatcgcagttgccacagaagaatatccgattgcactggaaattcctttctttctatgttcctgtgctttttcaagaagtacatcataatccagatgtttctccgtattttcaataatgtgtaccatcatctgcagagcctccgccggatattttccctgtgcagtctcacctgaaagcatcaccgcatctgttccgtcataaacagcatttgcaacgtctgtcacttccgctcttgtcggacgaggattgcggatcatggagtctaacatctgtgtcgcagtaattaccggcttatagttgtcattacatttcttgatgagcatcttctgtaagtacggtactttctctgccggaatctccacaccaagatctcctctcgcaaccatgattccgtctgcacagtggatgatctcatcgatatttttgattccttccgcattctcaatcttcgcgatgatcggtatatacggtgctccgcactcctttaacagtgcccggatctcaagaattccttctgctgaacgaacaaatgatgctgcgataaagtcaattccctgctctacaccaaaaatgatatcttcgcggtctttctttgtaagtgccgggaggcgtaccggaacattcgggacattgacaccctttctctctccgagttctcctccatttaatactttacaagtgatttcactgccactgatcgtctttacttccagctcgatcagaccatcatcgatcaggattctcttgcccggctctacatcctctgcaagtccgtcgtatgtgatggatacctttcttgcatccccttcaatctcttctgttgtcagtgtaaacagttctcctgcctccaactttactttctttccgtctttcagcaaacctgtgcggatttccggtccttttgtatcgagcagaatcgcaatcggctttccaatctcttcacgtacagatttcagaagatccattcttcctttctgctcctcgtgagagccatgtgaaaagttaaagcgtgctatattcatgccttcttccgcgagacgcttcatcatagctctgtcgttcgtatttggtcccatcgtacatataatttttgtctttctcatcttttacttttcctttcttatctcacttcagtttcaaaatcatttgacatgctcatgcgtaaataaatggtcctggcaatattcataatcgccattgcatttcgtacaatagcggaattccagatttgggtcgtccagttctgttctgccgcacacagcacatctgtgtcttgctccgttggcataagtatgttctgcccggtgcacctgtttcttatattctttctttcttctgatttcttttggcgagtaagccttcatattccttgatgatacatagaaaatcaggaagttcaaaagagagacgaatgccgcgatcgcatttgccttatatataattccatacaggcctcccgcataagacggcagaatcccctgcaagatcgtgaaagcgaaaaacgccccgtcaagcagtgccagatattttaccttaatcggaatgacaaagaacagcaaaaattccacattcggatacagtgccgcaaaggcaaaaaacagtgacagattcaagtacgaagtcccgattgggaatgaaattcctgtcaggaagtatacaatcagcgccgcaatcagatgaaacagtactccggtaaagaaatacagattaaatcggaatgcaccccatgccgcctccagattctgtccgatcatgtaatacaaatacaatgcaaaaataataaaaatcgggcttccgtccggcggttgaatcagaaacgtcacaattctccagatctgtccatgcagaatcgcgctggcatccaggctgagatactccatataaaaaccgggtgcgatcagattcagagcaaagccgacagcataaaggatgataatgtaatgcatcagattgtgtattgcatatcttccaaatttacgttctagtttgttgatccaattcatatgaataactactcctcttgacctttcttaaaatttactcatactaattgtacctgcaagctccccttttgtcaattctaacagtttattattttttcgttgtattttgtaacttgttgtcatataatgaaaattgtttttttaagcagactatattttaataggttagaacagaccttatttcttctaaaaggagcaatatttatgaattacaaacaactatataaactgggaatcgacatcggttctactactgtaaagattgcaattcttgatacagaaaataatgtactcttttctgactacgagcgtcattttgctaatattcaggagaccctttccgatcttctcgggcgagcgctttataaactcggtccaatcttagtatctcctgtcatgactggttctggcgggctgacacttgccaatcacctggaagttccttttgtacaggaagtcatcgcagtctctaccgctctccaggactacgcacctcagaccgatgttgcgatcgagctcggtggagaagatgcaaaaatcatctactttgaaggcggaaatgtcgaacagcgcatgaacggaatctgcgccggtggtactggttctttcattgatcagatggcttctcttctgcagacagacgctaccggattaaattcctacgcaaaaaattatcaggcgctctactccattgctgcacgctgtggtgtctttgcgaaatcagatatccagcctctgatcaatgagggcgctacaaaagaagatctcgccgcttctatttttcaggcagtggtaaatcagacgatcagtggacttgcctgcggaaaaccgatccgcggacatgtcgccttccttggcggtcctctccactttttgtcagagctgcgaaatagctttatccgcactctaaatctcgacgatgaacatattatcgcaccgaagcattcccacttgtttgctgcgattgggtctgcacttaactgtaagggagatcacgaaacctctctgacaacccttcagacaagactggctgaacatatccatatggattttgaagtagaacgtatggaaccactgtttgcaagtgaagcagagtatcagaacttcaagaccaggcacgaacgacatcaggttcctgtacttgatctctcctcctacaagggaaactgttttctcgggattgatgcaggatctaccacaacaaaagcggcacttgtcggcgaagacggaaatcttctttactctttttatcacagcaatgatggtgatccgttaggaacaacggtcaaggcaattaaagatatttatacaaaacttccaaatggggttaaaattgcccactcctgctccacaggatacggagaagcccttataaaagccgcccttttacttgatgagggtgaagtggagactatttcccactattatgctgccgcttttttcaatccagatgtcgattgtattttagacatcggcggacaggatatgaaatgcattaaaatcaaaaatcacactgtggacagtgtacagttaaatgaagcttgttcttctggttgcggatccttcattgagacgtttgcgaaatctttaaattatagcgtggaagactttgcacatgaagcactttttgccaagcatccgattgatctcggaacacgctgtactgtttttatgaactcaaaagtcaaacaagcacaaaaggaaggggcatctgtctcggacatttctgccggactcgcctattctgtcatcaaaaatgcactgtataaagttatcaaagtatcagatgccagtatgcttgggaaaaatattgtcgtacagggaggtactttctacaatgatgccgtgctcagaagttttgaaaaaattgcagactgcgaatgtattcgaccagatatcgcaggaatcatgggcgctttcggcgctgctctgattgcccgcgagcgtttcaatgaaagtaaaggaacaaccatgcttccgatagaagaaattgaagcgcttacatacagcacaacaatgacaaagtgccgcggatgcacaaataactgccggcttactgtcaaccgtttcagcggcggaagaagttttattaccggaaaccgctgtgaacgcggacttggaaaagagaaaaaagaacaggaactcccaaatttattcgcatacaaaagcgaacgttgcttcggttatgagccgctttccgaacaagaagccgtacgcggaacggtcggtcttcctcgtgtcttgaacatgtatgaaaattacccgttctggtttactttcttccatgaactgaaattccgcgttgtgctctcgccaccgtctagccgtaagatttatgaactcggaatcgaatctattccaagtgaatctgaatgttatccggcaaaactggcacatggacatgtggaatggctgatcaatcagggagtgacctttattttctatccttgcattccttatgaacgggaagaatttaaagatgcaaacaatcattataactgcccaatggttacatcctatgctgaaaacatcaaaaataatatggatgcaatcaccaatggaacgattcactttaaaaatccattcctctctttcaaaagtgaggaagtgctgtccaagcggctcatagaagaattttcaaaagaattccagattccagaacaggaaattcgccatgcagtaaaaaaagcatgggacgaacttgccgcctgccgggaagatatccgaaaaaaaggagaagagacgatcgcatggcttgaaaaacatcataagaggggaatcgttcttgccggacgcccatatcacattgacccggaagtcaatcacggaatcccagaactgatcaactcctacgggattgctgtacttacagaagactccgtctcacacttacacaaagtagagcgcccactgatcgtcatggatcagtggatgtaccattcccgcctctatgctgcggcaaactatgtcaagacaaaagataacctggatctgatccaacttacttcttttggatgcggactagatgcagtaacttctgatgcggtctctgatattctgacaaactcaggaaagatttatacttccctgaagattgatgaagtcaataaccttggagctgcccgcatccgtatccgatccttgatcgcagcgatccgcgttcacgaaaagatgcacacaacccgtacgatccagccatcttccatccaaaaggcagtatttacaaaagagatgagaaaagactatacgattctctgtccgcagatgtctccgatccactttgaccttttggagccggcgatccgctcctgcggctaccaactggaaattcttccgaatgataataaagaagcggtcaatgtagggctaaaatacgtcaacaacgacgcatgctatccgtcactgatcgttgtcggacagattatggatgccatcttatcaggaaaatataacaccgataagctcgctgtgatcatatcgcagactggtggtggctgtcgtgcttcgaattatattggctttatccggcgggcactcaaaaaagctggctaccctcacattccggtcatttccctgaatttgagcggccttgagagcaaccctggattccagatcactctccctcttgcaatgaagggaatttatgctgttgttctgggagatgtcttcatgaaatgtctgtaccgtgttagaccatacgaagcagtccctggttctgccaatgcgcttcatgaaaaatggagaaagaagtgtaaagaatttttatctggtggttatccatccaggcgaactttctcatcgctgtgcgcacagatcatacatgaatttgacgaacttccgattctcgatagaaaaaaaccgcgtgttggaatcgtaggagagattcttgtaaaatttctccctgcagccaacaatcaccttgtggaactcttagaacaggaaggcgccgaagctgttgttccggatctcttggacttttttgcctactgcttctataacaacaatttcaaagcaagccaccttggaatgaaaaaatcttcggccacaaagggaaaccttggaattcacgcactggactggttccgggcaccggcttctgttgcctttgcaaagagcaaacgtttttctgaaccagcaaagatttcagatttggcagcaatggcacaagacattgtgtctgttggaaatcagactggggaaggatggtttctgaccggagaaatgttagaactgatccatagcggtactacaaatatcgtctgtgcgcagccatttggctgcctcccaaatcatattgtcggaaaaggtgtcatcaaagagctgcgacaccgctatccgcttgcaaatattgttgccatcgactatgatccaggcgcaagtgaagtcaaccagctgaatcggatcaaactgatgctgtctaccgcacaaaagaatctggagcgaaaagaagactaatttttagtcttctttctgctcttttattttcaacactgccataccgatactgatacatgctgctgcaaacaaacactgaatcccaaatgatttccagatttcgctctgtctctccggtgtaatctcctggaacccggcaagcagattgttgacttcttcataccaataaaccggaagtattctggagaatttcaatatccctttatctaatacagatgttggagtgaacacccctccaagaaaagaaactgccaacgctgtcacattcacaataatattgatgacgttctcactttctgcgactgcgccaatcaaaaatgccattgcaaggctcgttagaaccatcaggaaactgtttcctgccagatacgtcgcatgcgggctttcgaaaaaactattttttgaaaaaattatggcaactccgatcatcgctgcccagaaaataatccctacaactagaaatgcaagcattgcttccaccgtctggcgacgcagagaaactgcagaacattgcagccgctgtctgatttctttcttccggtatgcattcatcggaatacttaagatcagacacaatactgcaatggaaaggtatggaaggaaacgaaaaatataataataagattcccatttcccctgattcccattgagatttaaaagtctgaccgatttctcttccaactgttggtttacaagcgcaaatgcttcctgcatggaatacccattttctgtacaaaactgcacttgattcagaaacaaattgatctgctgtttcaaataatccgcttctgcatatcccggtatttttgtcaactgtacttcccacttttctcccactcctctcggaatgcggatcacactagaaatttccccatagtaaattgcctccaaaagagtcccctccgcattgcctatctctgtgatttcatgcaaagtcgcaagataatttgtaagcccttctgccagcattcctccatcctcatccacaactgcaatcttcagacggcttctttgaaattctttttcttcctttttctgtgtttccccctgtataatcagcattgtcaaaagaaacagtgcagtgtaaataaaaataaatccccagttccgcttgatgatcaaaagatatcctctaaatactgtcatagcgtttcctcctcattacaatacatccggcaacaagaaacatcagccccattccaaacagcataatcacatttctccagtatcttgccatatcttcataaattgtcatactgaagaatccatccgagatcagcgcaaccgggttccatgcattgagtagcggacaatatttgtccacaatatgtctcatattctgtaccataagccctccaaaaaaactgagcaacatcgtgatcaacgtcaagaaattcagtctatgtgtccctgaactttttccgatacttcctgcaataatgccgaaagacactccaatcattcctcctgccatacagagaagtaagattttcccattatcttccccaagcggaatccgaagaattcctttcaggtaacagatcaaaatccacaagtttacaaaatggatcccgtacacaacgagaaaatctgccatcattatctttcctctggacagataacttatatttctcctcatccccaccggtgactgatccgcattgctgctaagagatacagcaaaccccaaatcgcagccaaacatgcaagccatcccgaccagtgcaaaaaaatactctacaagagagtttcttaccgttcccccaagagaagtttctgttgttcgatccctgtatgctttcatcgaatctatcattccttcaagcctctccggatgttctatcgccactttctctatcagtctttcatttgtattatactgctccagtatcgtttctaatatgctgggagcaactcccgtggcggcaactgtcagtgtccgttcccttccctccgtataaattccttgcacctttccattttccagtgctttttctgcctcctcttcttccatcacatgaagagatagcagatcttctgcgccttccaaaaatgtcagaaaaggagaatcttcttccgcgacaactgccacatcaatcatttccagctgtggacaatttgcatttttccaaaatccaaaatagtaaagtgttccgagaatcactgggaataataatgcccagaacatcaatgcacgcatccggatgatctgtaaaaaacggtatttaactaaatgtaacatcgttctccctcctcaatctctaagagccttaccagtaatttcaagaaatacatcattcagtgtcggctgctctgagaacactcttccaaaagcaatcttctcctgggaaagatagctgagaagccggatcagattctctccatcttccgtacagtgtatcagcaagcgctggtccttccagactgccgagaagacatgtggcaatgtccgaattttctcaatctgtttctcatttaaaacaaccgtgtcaatcacaattctctgccctgtcttcaccattcgtttcagctcttctttcgtccctgtcgcaaggcatttgcctcgatccaaaatggaaatctttgtacagatctgctcaacctcctccatatagtgggaggtatagataatcgtactccctttacgattaagctccttaatcccctctaaaattttatttctgctctgaggatcgactgccactgtcggttcatccaaaatgatcaggcgaggtttatgtgcaattccgcaggcaatgttcagccgtctcaaaagtcctccagaaagtttttgcggacggaattttaaatattcttcaagtcctgtaaacacaatcgcttcctccaccagttttttccgctttgatttctcaggaatgtaaagtccacagaaataatcaatgttctcataaacactaagttcttcaaaaactgccacattctgcatcacaaccccaatctgtttcttcagatgataactttccggccggatttcttccccaaatacttttacacttcctttatcaaattttaaaagtgccagaatacaattaattacggttgtctttcccgacccatttggccctaatagtccgtagatttctccctcttgtacttcgagattcaagtgatccagtgcaagtatctttccataacgtttcacaagattttctatcaaaatcataattttttctcctcccatgttcatcattttctttactgccattataaaaaatctattctgcttcgaacagtgtcacacgtcagctccctatatgacatttgtcactttttaatcttaaatgggaggaaagaacttaaaacagacagaatttctgcagaccgataaaaaagtaatgacgtcatttcatacagatggtataatatttctcatagtaacagtccggatcacttccgggaaaggatttcccatgcgccagtttttaaataaatcatttctcatattatattctctgcttctcctctgcccgacaaatacggaccgttcttttgttgtgggattttttcttgctgtttttactgcaatgactactttcttttttacatcccgccgctatgcctgttctgttcttcctatttttcttgtggcagctccattctatccggcgctctttttattttttccggtcatttgctacgatctctgcctttacagaatccttcccctatttgttctggtagtcgcggactttcttctccttataacttcttccgctactgatcaaattctatatatacttttcggatgtatcacagccattttgctggaaaaacatacttctgattacgatcagctaaaggaacagtatattcacaccatagatgatcagaccgaaaaaaacatgctcctatcccagaaacatgaagcactcctccagaaacaggattctgaaatctatgctgccaccttacaggagcgtaaccgtattgccagagaaatccatgacaatgtaggccatatgctttctcgggcaattcttctatccggtgccattaggacgatcaacaaggaagaatcgttacaggaaccactcagacagctcaccgatacattatctcttgcaatggacaatatccgcacaagtgtccatgacttgcacgacgactcagtcaatttaaaagaagtcactgaggaactgacctcctcctttactttctgcccgatcacactagagtacgacatgccgatcacggtcccacgaaccattaaatatgcttttctctctattacaaaagaggccctctctaatattatcaagcatagtaacgctaccgccgtttcaatcctcatgagagaacaccctgcactctggcaacttgtcatccaggataacggtactttacaatctccttctgccacagaaggaatcggcttggaaaatatgaaagaacgaatccgaaaactaaacggcacgattacattttcctgcgaaaacggtttttcgatttttattgcaatcccaaagaacaaaaaggaggaatctgatttatgatacgacttttaattgtcgatgatgattatctgatcactaccgcattaaagactatcctcgaggcagagggagatctttctgtctgcggcatcggaaaagacggaaatgatgctgtcagattatataagcaacttcagcccgatctccttctcatggatatccgcatggaacatctggacggactaaatgccgcagaacagattttgcagagctatcccgatgcccgtattcttctgctcactactttttctgatgacgaatacattataaaggcattgcacctgggagcccgcggctatattttaaaacaagattatactggaatctcccctgcaatccgtgctgtcctgaaaggacaaactgtatttggcgcagagatcacgacacggattccaaagctctttgagccacagaaagctttcgattacgaaacgtatcaacttaccagccgtgaattttctatcattgagcttgtggcagatggacgcagcaacagagaaattgccgaagcactgtatcttggcgaaggcaccgtacgaaattacctcagcagcattttagaaaaattagagctgcgggaccgcacgcagcttgctgtgtttttttatcaacatttactgtaacgcagaacaaaagcattttactccaatccttgacaaagagccaaaaagaccctgaatagaggagtttcctctatccaaggtcgtaaattcttctaaatattctcttttgccttttggggaatatttcactttgccccctaacaacaaattagcctctcgctattttacaagcagggatcttcctgtcatttcttccggctgttccattcccatcagttcgatcagcgttggagcaatgtctgccagacatccgtcttctcttaacttgtatgcagggtctgcattgacaagaataaatggaaccggatttgttgtatgtgctgtaaacggctctcctgtttcataatctacaagctgctctgcatttccatggtcagcacagataaacatctgtccattcacttctttgatcgcttccacagttcttccgacacattcgtctactgcttcaattgctttgatcgctgcattctcaactccggtatgtcctaccatatctggatttgcaaagttaatgataattacatcgtatttgtcagatttgatcgcatctaccagtttatcgcacacttcaaaagcactcatctccggctgaaggtcatacgttgccacttttggagactttacaagaatacgatcctctcctttattcggctcttccacaccaccgttaaagaagaatgtcacatgtgcgtacttctctgtctcagcaattcttgcctgtgtcatgttgtgtgccgcaaggaattcaccaaatgtatttgtaatttctgtcttgtggaatgcaacaagtttattcgggatagttacatcgtactctgtgaaacatacataagttgtcttcacgcgctctcctctgtcaaatccatcaaacgcatcatcacaaaatgttcttgtgatctctcttgctctgtccgggcggaaattgaagaaaatcacagaatccttgtctttgatcgttgcaatcggagccccatctcttacaacaacagtcggcacaacaaactcatctgtctttcctgcatcgtaagatttctgcactgcgcaaactccacattccgcctgctctccttctccttttaccattgcattgtatgcaagttctacacgatcccatcggttatcgcggtccattgcataataacgtcccattacagaagccacttctccaacaccaatttctttcatcttgtcagataattcctgcacataatcttttcctgaagccggtggagtatcacggccatcaaggaagcagtgcacatagactttgtcaagcccttctttctttgcaagttctaaaagtccgtaaatgtggctgttgtgactgtgcactccaccatcggataccagtccaaacagatgaagcgcagaattgttttcctttgcgtttctgcacgctgtaagcagcgcctcattttcaaagaaatctccgtcctgaattgctttcgtgatctttgtcagatcctgatacacaattcttccagcgcccatattcagatgtcctacttctgagtttcccatctgtccttccgggagtcccacagacattccacttgcatttccctctacaaacggatactctttcatcaagctgtccataaccggtgtctttgcctcgcacaccgcatttgcctcacacttttcattcagaccatatccgtcaagaatcattaaaaccgtaggtttcttactcatatagcaaatctcctttatgttaaaaaaatgtcgtaatttctacgaagtttattttacatgattttttctctcgttgcaagactcaaatatgcattcggcggcgcacttcctcccgcagtcttgaaatccgcattacagtaatcagagacactgcaatgattgctgcacagacaacaaccgctgcggaccatgtcagacagaatttttcataaagataataatagacactcagatcaatgcccgcacagaatactgccatctcgatcacaacaaccatcgccgtgaacaaaatagatctgctgacatgttgatagacatatagcagaactgccacaagaaccgttccgagcagaataaccgggactgcaatctgcacataccagtccatcccatgattcacccatgccacaagcgccaaataaaaaagaactgcacacccatctatcagtaccatcaaaatatacggcagcttccgatacaccatgatcggaatggaaaacactaaaaatacaagacatgccccgatcacatacagcgaccataaacttcccttgtatacaaacaaattcaaaagtccacagcccacagctgtacttccaaaaagcacgatcaaaaggattgcaaggtctgtccgttttaccttctccactgttccgcgctcagatggatagggcggaacttttttctctgttttttcctcctgtggatgatacaccggagtattgcaaagcggacatttggtcagcgtttcctccagtttcactccacaatttacacaataagccatctcacacctctaatctcggttgctctgaattgtcacagcaaccccttcttctaccaattttctgaaaaatacccgctcaatgtcattctccacaatactgctcgcaaaattgatggtcgtaagaccgttataacttacgatcgcacaattcgtccgagcggaaaatggctgtcccatcagcacatcaaatcgttccagatacggttccatctccgcaggaactttgatgattccaggattggtaagccccgcggaagactgacaatcctgcacatgtttgtaaaactgtttaacgacaatatccttaatacaaagcggaacaatacggatcagcggactctgcagtgtctttgcattcgtcgtaatatctgcattcaaaaacttctcattgatatgatatcgcatataatagtggatctcttttaaaatctcctcaaaactatattctcccattcgcggatccactccgggataaatcattgtaataaaattccgaagtgtctttgatgggaaaaactgtctcagattgactggcatcgcaatcctcaccggcttttccctccacaccttgctgcgcttctgattctcaatcaatgcatagaccaatacggcatttaaatactccgtgatcgtcacaccgtattttttcgatgctgtcttaagatcactgacactcatacttccactgataatattcagtgtatagaacggttcttttgtcccacgcaccctataggcactgccctgactcctctttggtgtcaccttagaattggcatacttcatataagaatcttccagttcctctctttttggttcctcctctacagaaagaataccctcctcatccggaatcttcacaccgcgcatccgcagataaactgctgtcagtgtctttaaaaaagtaactgccccaagaccatcggccagagaatgaaacacttcaaaagaaatctgacattcataataatacagacgaatcagatagcggtgctttgtcttaaaatccatcggcatgcatggatttttgacatctcgctccacctgcggcaccgggtttttatttggctccagataacgccaaaacaatccttttcgcaatgcaactttcaaggatggaaatctcggaagtgtcttctcataagctttctggagaatctgaggatctaccttttctttcaaggtgacagaaacgcggaataccgatgagaaactttttctctgaagtgtcggataaacattgcccgacaaatccagttttaaccattgatttctgttattcatctttttcttcctttcctagctttattataaagaatttgattgtatatgacaactgctttgtgatagaataaattactacaagaaaggatacgaggatttatgccaaatcaagagaaaaaacaacagggactgatgaagatcatcaaggctattcataattttacagtcaatgacgatttagaaaaatacagacgctctcaggcaaacctcgggcgactgctcgggacaaaacaaagtgaagcatcctacactgaatttttgatcgatgatattccctcagagtggatccgcctgaatcgtccacaccagaacgagacaattatcttatactgtcacggcggcggcttctttaccggaagtctcgaatattcccgtacactgacaacaaagcttgcatctgcttcttcctctgacattttaagtttcaactaccgccttgccccggagcatccctccccggcagcattggaagatgcattaaaagtgtgggggtatctgatgcacttgggatacggtgcaaaaaatgttattctcgctggggattctgccggcggtaatctggctctctcacttgcgttgaagctcaaggaagatggacggattctgccaaaagctcttgttctcttttctccgtggacagatctgacattaagtggcgcatcccacgaaaaaaaagcggcattggatccaatcctgactaaggattatcttgaacgcgcgcggtgtgcctatgtaccagagagcaatagtgatgctagcatttatgcagatccttttgtctccccgctttacggaaattacacggggtttcctcctgtctatatccaggttggaaccaatgagatccttttgaatgactccacagacttacacaagaaacttcttcgacaggatgtcgctgcaaagctgactatctacaaaggaatgtggcatgtttttcaaatgtcaaatatgaagacggcgacagaagccattaacgaagccgcacagtttttattccgcttataacgtacatttgctatgggatcttcttcctgttcccgatcaaaattacatttttcaaaaacaagcagaaactggacatatcacaaatgaccgacagagggatagattcaaattctatcgtcttccctctgccggtcatttcatttttcataaagccatctgctgcaacacgctttcctaatgcgttgctgcagcatccgcaatgattccacaaaaagtgtttctattatttattatagttcacgatcgctccaaaatctggtttcaaggaagctcctcctacaagtcctccatcgatatctggctgtgcaaataactccggtgcacttgctgcagacacactgccgccatactggatgcggattgcctcagcagttgcttcatcatagatttcagcgatacatgcacggattgctgcacacacttcctgtgcctgctctgttgtagccactttaccagttccgattgcccaaataggttcatatgcaatcactgctgtctttgcctgatctgctgtcacatcaagaaatgcgattttaatctgctgacggataaagtcgattgttactccctgctctctctgtgtcagagtttctccacagcatacgattggtgtaataccatgctcaaatgcttttttcacttttttattgactgtctcgtctgtctccgcaaaatattcacgtctctcagagtgtccaatgataacatatttcacaccaacatctgtaagcattgcaggagagatctctcctgtgtaagctccactctcttcgaagtacatattctctgctccgattgcaatattgcttccctttgctgcttccattgccggaataatgctgattgccggtacacaaaatacaacatctgcatcttctgttgccactaatggttttaactcatttacaagtgctactgcctcacttggagttttattcattttccagtttcctgcgataatttttcttcttgccatttttaacgtcctctttcctaaaaatatctatatgtaaacagggctgccgcaaagtgaagcttttctacaagctagcatctgccacccattaaacattgctgatcccttgtaaaaactttctattttgcagcacccctgctttgcgctaaagtattttcttatttgtcgtttgctgctgcaacacctggtaattcttttccttctaagaattcaagagaagctccaccacctgttgaaatgtgtgtcatcttgtcaccgtatcctaactggtttactgctgctgcagaatctccaccaccaatgattgtaactgcttctgtatctgcaagtgcttttgcaactgcttctgtacctgctgcaaatttcggcatctcaaatgctcccatcggtccattccatacaactgtctttgctgtctttactgtctcagcaaacaactctgctgtcttcggtccgatatcgagtccttcccatccgtccggaatctctccgcttgcaacaacttttgtatttgcatcgttagagaaatcatctgcaattacattatcaactggaagtaataattttacacctttttcttctgcctttttgatcatgttcagtgcgtattcacagtaatcttcttctaataaagattttccgactgttccaccctgcgctttgctgaatgtataagacatacctccaccaatgatcagaacatctactttctctaacagattttcaataacagaaatcttgcttgatacttttgctcctccgagaattgcaacaaacggtctctctggattgtttactgcatttcctaagaagtcaatctctttctgcattaagtatcctactactgctgtatcaacgaactgtgtcacaccaacatttgagcagtgtgctctatgtgctgtaccgaacgcatcgtttacgaatacttcacataaagaagcaagttctttgctgaatgcttctccgttctttgtctcttctgctctgtaacgtgtattttcaagaagaatcacatccccgtcttccatagcttccactgctgcttttgcatttggtccaacaacttctggatctgctgcaaatttcacttcctgtcctaataactcagaaagtcttgctgcaaccggtgctaaagataattccggttttggctctccctttggttttccaaggtgtgagcagagaatcactcttccaccgtctgcgattaatttcttaattgtaggaagcgctgctacaagacggttctcatctgtaatctttccatcgatcagcggtacattgaagtcacatcttacaagtacctttttcccttttacattaatatcatctactgattttttgttaagcatgtttatatcctccttgactataaaaataaaagtcaacttatcttttttaaacccgcaaagggtccggcccataagaccggacccttttggatcttcttattccgaatcttttaaaattaagctaattcagagaagtatttgattgttcttaccatctggcttgtgtaagaattctcattgtcataccaagctacaacctgaacttctgttgttccattgtctaatggaagagccattgtctgtgtagcatcgaataatgaaccatatctcattccaacgatatcgcttgatacgatctcatcttcgttgtatccataagattcgtttgctgctgctttcatagctgcattaatttcttcaactgttacatttccttctactactgctgttaagattgttgttgatcctgttggtgttggaacacgctgagcagatccgattaattttccgtttaattctggaataacaagtccgattgcttttgctgcacctgtgctgtttggaacgatatttacagctgctgcacgtgatcttcttaaatcaccttttctctgtggtccatcaagtgtcatctgatctcctgtgtaagcgtggattgtacacatgataccagatttaattgttgctaatttgttaagtgcatcagccataggagctaagcagtttgttgtacaagaagctgcagaaattactgtatcttctggttttaatgtttcatggtttacattgtaaacgattgttggaagatcatttccagctggtgcagaaataacaacttttcttgctcctgctttgatatgagcttcagcttttgctttagatgtatagaatcctgtacattctaatacaacgtcaactccgatttctccccatggaagttcttcagcgtttgcttttgcatagattttgatttcttttccatctactgtgatagaatcttctccagctgttactttgtcagctaaagcgtattttccttgagatgaatcatattttaataagtgagctaacatttttggagatgttaagtcgttgattgcaactacttcatatccttctgctccgaacatttgtctgaatgcaagacgtccaatacgtccaaatccattaatcgctacttttactgccatgattaattcctcctaaagtttcttaaactattatttgtatttgacaattccttaactttgttaaagattcatcaacctttatttattgtactaaatccgcacagaaaattcaagtcatatttacaattttatggaagttgttgaaaaacaggttttcttcctttaaactctgtataatattgaaagccacaactatgcaggatctcacttacaagtccaaatgcataagcaagatgctccggtctatgtccatccgaacctactgtaacaatctctccgccaagctcccgatatctctttaaaatatccggatgcggatgaccaaatccaagtccatacttatatcccgccatattcagctccaacccttttccttgaccgatcagctcccgcaggatttcatcgatcagatctgaaaaggtactgtaagaatagctctctatacttcttccatagcgcacgacataatccaaatgaccaagtacatcaaattctgagaccgcacggatattttccagtgttgccaaaaaagccgcctcatatgcttcccgatctgttcttttctcgaaaaactgtggataatacggatcttctgactgaatcacatgcaccgatccgagcacaaagtcaaacggatactgactgatatactgtttatagtactcgccaaggtgcggctgaagtcccagttctacaccaatccgcacatctatcttttctcgatattcctgctgaagtctctgcattgtccgaaaataaaattccgtatcgaacgtaaaggaaagaggtcctccttgataatctttatcctgatggtcagtaaagcaaatcgtttgaagccctcttctgattgcctcttgtatcattgcttccggttcaaattctgcatcagatgaaaaactggagtgcatatgaaaatccgctttcatcctttccctccttcacattttttctgctcgaacagcatgttgcttctatagaatagtacctcctccgacaacatactctccatcatagaaaacaactgcctgtcccggagtaatcgctctctgcggttcctcaaaggtacatgtaacctcatcttttccgctctttcggattgtcccccatgctcctttgtgattgtaacgaatcttagtccatacgcgcatctcaccggttaaatcctcaacggacataaaattcaactgattcgctttcagtgtataggacagagaatcttcattacttcctattacaatctcatttgtctccggccgaatctcaagaacaaaagccggatgtcccaaagacaacccaagtccttttcgctgaccgaccgtatagtgcgtgatgcctttatgtctcccaagtactcttccatcaagatctacgaaatttccttccgggatcttcacagctgcctcttcttcaataaaagaagcataatctccatctggtacaaaacagatatcctgactatccggcttattggcaatgcgaagatttattttttctgcaatctccctcacttggtctttcgtatactcaccgaccggcatcagtgtcctcttcagctgttcctgcgtcagattgtaaagagcatacgtctgatcctttgccagagtcgctgaacacttcaatgtataccgtccgttttccagctgcacaactcttgcataatgcccggttgcgatataatctgctccgatatccatactcctcttcaacaaggattcccatttcacataacggttacaggcaatacatggattcggagttcgcccatgcagatattcctgcacaaaataatcaatgaccttttctttaaattctttcttaaaattcatcacatagtatggaatttcaagtgccgccgcaacacgtcttgcatcatcaaccgcactgagcccacagcagcctccgttttcttcttcaactgcgcgatcctcatcctgccagatctgcatcgtcaccccgattacatcatacccctgttctttgagcagatatgctgctaccgaagagtccacacctcctgacattcctacgactacctttttcttcatctaaattcctcccgcccggcagatgccagactgtgtttttgtattcggattagtattcttcctcatcctcttcgtcttcatggatatcagatttcggcttcgtcaatccttcgatcttgattccgtttttctctgcataatcccaaagcgctgcatgaattgcttcctcagcgagaagagaacagtgaactttcaccggcggaagtccatcaagtgcttccataacagctttatttgtcactttcagcgcttcataaatactctttccctttacaagttctgttgccatactgcttgtggcaacagcagctccacaaccgaatgttttgaattttacatcacgaatgatctgatcttcatcaatatcaagataaattcgcataatatcaccacattttgcatttccgacagttcctaccccacttgggttttctaattctcctacatttcttggattctgaaaatgatccataaccttctctgtatacataatatttttcctcctgattcttccagcagggccgcttgatccatgcctgctgctctttgattttttatttgattctattttgctttcttttcttattttttctgcttcttctgaaaatcttcatagagcggggacatctttcttaaatgctccacaatctcttttaatacatccgctgtataatccagatcttccttcgttgtctcttcactcagagtcagacgcaaggaaccatgtgcaatctcgtgcgggagtccaatcgcaagcagcacatgagatgggtctaaagatccagatgtacaggccgatccgctggaaccgcagattcccttcatatccagcataattagaagcgattctccttcaataaactgaaaactaaagtttgtattattcggcagtcttttgctctcatgtccattgagtctactatatggaatctcagtgagaatccgattgataaaatagtctcttaattcgacttcctttttcgttctctcttccattgactcagctgctctttttgcagcagttccaagtcctacgattccaggcacattctctgttccggcgcgtctctttctctcctgcgctccaccatgaacaaaagagcgaatctttacccctttacgaatataaagaaatccgattccttttggtccgttgatcttatgcccactcgcacttaacatatcaatatgacattcatctacattgatcggcacctgacagaatgcctgtacagcatctgtgtggaacaaaattccatgttcctgtgcgatttccccgatttctttgatcggctgaattgtaccaatctcattgtttgcaaacatgacagaaatcaaaatagtgtccggacggattgccgcacggagttgttccaagtctaccaatcccttctcatccacatcaaggtacgtcacttcaaacccttttttctccagatactctgctgtatgaagaattgcgtggtgttcgatctttgtagtgatgatatgtctgcctttgttctcataacattctgctgttgctttcaacgcccagttatcagactctgaaccacccgctgtaaaataaatttcatttgcctctgcgccaataatctctgcaatagtctctctctgtctcgtgataacctctttattgcctgctgcaaacccatacacgctggatggatttccataatattctgtaaagtacggcagcattgcctctacaacttccggagctgtctttgtcgttgctgcattatctaaataaatcaatttttccatgtctgtatcctcctaatttccgcaatgcatctgaccaggaatctgttgtcccttcatcgccttgctctcttctaccagacggtcaagcttgatttcatccaccgtctgattaatactttcgttgattttctgccagacatacttcgtcacacatcctcctgcggcctcgcatccttcttctgggtgaagcccactgcactctaccggttctaaatttccttccagcgcacggagtacgtctccaacggatatactttctacttctctggcgagcacatatccaccgccagcaccacgaatgctcttgatcagccctgccttctttaatttcgccatcagctgctccagataacgttccgaaatcccctgacgcgctgcaatactgctgatcgaaaccggttcaatctcgctgtactgcgcaagatcaatcaatgcgcggagtccatatctcccctttgtagataatttcaagttctcaccttctttattctcaatccctactaaattactaggatttacattttgtagaataccactccttttttgttctgtcaagactctgttttgaatatgtttatacagattacatatcttgtcaccggagtcattatgtctaaaaaatatacaatcttaaaaggtactttcatccttaccgccactggcatcatcacacgcctgatcggcttcttctaccgtgtctacttaagtcagacgttcggcgaagaaggtgtggggctctatcaacttatttttccagtttatgccctctgcttctctctgacagcagcaggaattgagacgaccatttcccgctgcgtcgcaagaaaagcagcgctcggaaaacttcaggaagccagggaatttctctttaccggaatgagcatttcctttcttctctcatgtattgttaccatttttctccagaataacgcacacataattgccgttcattttattggtgaaacacgctgtatcccgcttctcactgcaatgtcctatgcatttccattcgccgcgatccacagctgtatctgtggctattatctcggtctcaaacgcaccggtattccagcagcctcgcaactcatcgagcagattgcccgcgtactctccgtctatcttttttccctttatcttcttcatgatcagaatacactttctgtgacgcttgccgtatcagggcttgtcgccggagaaatcttttcctccttgttttgtgcccaaatgttttttcacacgcaccgtcgccatcctgtacacacttctattcaaacagtacaccgttgcctttcctatgtaggagaacttttccggctttcagttccactgactgccaaccgcattctactaaaccttctgcaaagtattgaggcaatctctattccaaaagcactgattacatatggaagcagccgaagcgaagctcttagcctctacggcgttctgactggaatggctctcccatgcattttattcccatctgcactgacaaattcgatttccgtcatgctgctccctacagttgcagaacttcaagcttcacaaaaacgcgaaacgcttctgttattaattaaaaaagtttttttctgttgttttgcacttggtctgtcatgtaccattggatttttgctgtttggtcgtttcattggaagcaccttatttcacagtacccttgcaggcagtctgattcttacactcgcctggatctgccctttcctctacacaaattccacactggtcagcattttgaacgggctaggacataccgcctcttcctttttcgtcaataccgtcggactgctgctgcgtatcgctagtgttttctttttgattcctcttgccggaatccgcggttatctctggggactgcttggaagccagctgacaatcacacttctctgtctctgggaactcttccatcttcttcatcggaatccctcagtctgatgcacacaaaaagcatattttgacaaaaggatactccctctgtcaaaatatgctttctcttctcataactctttgcatcacttcacaaacaagcgaatggcagcctttaaacataccggattgacatatgcctccaaggcgatacctgccagaaacattaggcctgtgaaaatacttttcccgctattccacctgacttgcggcgataaatataggtaccatagatagacaagcgccgccgggaggtaaaagaaaatttgcggaaatactcccaccgcacaaatcacaatcccagcagctccaagctgaagaattcctgacgtcaacacaatgccgcttgcgaggcctgtccaaagaagcgtcaccaccaccaccatctgtttccatcttgtacagcctgctgccagaagaactccgaccgggattatccgaatacgaagaaggtatcccaaatattcttctgggataatctctgtaatctggaactgtctgagaaagtactcactaaaaacaccgtacgattccagataactgtccgataccatgttcgcatataagattcccgccagaaatccagacatataaaaaatcaaaaactgttttttactctgttgtatcttcaaaaacatccctcctgttttcagatactctatatatatgtcctccacatgttcttcatgacctcttcttcggctgatggaattgtatttatcctttccgcttattttgatttctttcccagattctcaactatcattttcttctaacagtactttacggcatatgccatcaatgcagagattgtctttccatcttcaatctctcctgcaaaaatcttttctttcagttcttccattgtatatgcttccacttcaacaaattcatcctcgtctaaatgttgttctgtaggaattagattttttgccacaaaaatttcaatcctctcattacagaatgccactgtcgtacgaagtgtgatcaaccattccaactgctctgatcggaatcctgtctcttcctctaattctcttttggcacagacaataccttcctcctttggatcatccaatttccccgccggaatctccaaggttgctctgtcaagcgcattcctatattgtcttaccataagaatctttccatcctctgtcacagggacaaccgccgccgcgccatcgtgatggatatagtcccactctgccacatttccatttggcagctctacctgatctcggtaaacattcagaactgccccctgataaaccagttcccgcttccgtcttttaatttcttccattgtctttgcttcctttctctgtaaacttccgcattccattaagtgcggagcacttttatttcatagaatatatttcctacaacaaaaaataacagacaatagagactgctctccactgcctgttatttttcacttttgtggtctttgattctatatagttcttagtctatttcgcatagtctgtcactcttgactcgcggattacatttactttaatctgaccaggatattccaattcaaactcaatctgctttgaaatatctcttgccatcaataccatatcatcatcagatacctgttctggaactaccataatacgaatctctctacctgcctgaattgcaaaagatttatcgacacctttaaactggttcgcaatatcctctaactgttttaatctgtttgtgtacgtctctaacgtttctcttctcgcacccggtcttgcagccgatattgtatccgctgcctgcacaatacatgcaatcagtgtttccggttctacatcaccatggtgagattccactgcattgataactgtagcagattctttgtatttcctacaaagatccacaccaatctggatatgagacccttctacatcatgatcaatcgattttccgatatcatgtaacagacctgctcgcttagccagtctgacatccagaccgatctctcctgcaagcagtcctgagagctgtgcaacttcaatggagtgtttcaatgcattttgtccatagcttgtcctgaacttcattcttcctaaaagacggagtaactcaggatgaataccatgtacgcccacttcgagagctgctgcttctccttcctcacggatcattgcttctacatctctctgcgctttctctaccatctcttcgatccttgccggatggatacgtccgtcaagaatcagtttttccagcgcaattcttgccacttccctgcgaatcggatcaaaacctgataacacaacagcctccggtgtatcatctataatcaattctaccccggtcattgtctcaagtgtacggatattacgaccttctcgtccgataatacgtcccttcatctcatcacttggaagttgtactacagaaatcgtagtttctgcaacatgatctgccgcgcatttttgaattgctgtcacaacatattctcttgctttctttccagcctcttcttttgcctgattttcaagttccttgatcatcttcgcagtgtcatgttttacatcatcttcaacagtttttaataaatattcttttgcctgttcagaggtaagtcctgagattctttccagttcctgtactcgtttactgttaagctcgtctactttgatctcacgctgtttgatctgctcttctcttactgtaatcttcgattcacgctgttccagtacatcggctctcttgtcaagcgcttcttctttagataagacacgtttttcatagcgctgtaactctgctctacgctcttttgtctccttctcaagttcattttttgtcttaatggactcttccttgatctccagaagcgtttccttcttctttgcctctgcattctttaaagcatcatctattatctctcttgctttgttctcagcattcccaatctttgaatctgcatctttcttcagattgttcaccgttacatagtaagtaataacaacagctgccacaactgcaatcagaccagcaattattgatactatcggcacaggagcacctccttatttaattttcattgtacacaaatacaacacttagattttataccgttttcacaaatatgtcaagtatgcttacaccgttttggtcatttttatgaacctctcagctatctctaccaatatacttcttccgcctccagagctcttcggatattctcataagaaaatcccttccgcataaaataagccgtttgtttctgctgctcttctcttgtagcatcgcgaaaatgatattttctctttgctgccaaccggcggatcgcttctatctcatcatcttctcctgtatagcattcctccatggcaagctcaatcagttctctttcaatcccttttcctacaagctgtgcatacaattcccttttacttttctgattctgtctgttctgaatgtatcgctttgcatagtcaaggtcgtctatataaccaaatgacttcacatatgccagtgcagcttctaccacatcttcagtataacaactctgtctgagtttcgtgcggagctgtgattctgtccgatccatgtcattgagaaggtgcattgcgcgaagcttagcccgctttataatcacttctttcttaatctgttcaaaactctcctctgagacttcacattcttctctgatctgatagtgtgacaattctcttcgatacaaaacaaaagcgaactctccgtcaacctctactttatacctgttttttgatacaagctctaccttcgtgacaatcatctcttattcatctgccttctgttccgctgcaagttcctcttctcctgccgctccgtcaagcttataatgtgcccgtacttttgtctcaatctcttccatcacttctggatgtgtagagagatatgtctttgcattctcacggccctgtccaatcttatcgccattgtatgcataccatgcaccactcttattgataatatcaagccctgctgccagatctagaatgtctccttccttcgaaattcctttcccgaacataatgtcaaactcagcttccttaaacggcggtgcaatcttattcttcactactttaattctggtacggttaccgaccatctctccaccctgctttaacgtctctgtccttctgacatccatacgaatagatgcatagaacttcaacgcacgtccaccggttgttgtctctggatttccgaacatcacaccgaccttctcacggagctgattgataaagatcacaacacaattagacttactgataactggtgtcagctttctgagcgcctgagacatcaaacgtgcctgaagaccaacatggctatctcccatatccccttcaatctcctgtctcggaacaagtgcggcaacagaatcgacaacaatgatatccatcgctcccgagcgcaccattgtctctgtaatctccaacgcctgatcaccactgtccggctgtgaaatatacagttcatcaatatctaccccgatattcttcgcataaactggatccagagcatgctctgcatcaataaagcctgcaatgcctccccttttttgtacttctgcaatcatatggagcgctactgtcgtcttaccacttgactccggtccgtaaatctcgatgatacgtccctttggcactccaccaagaccaagtgcaatgtctaggcttaaagaaccagtaggtactgtctcaacactgacatttgccgccgcatctccaagtttcatcactgctccctttccaaagtccttctccaactttgcaattgctgcatctaatgcttttaatttatcgtctcctgccataatattctccttttcaaatacgaacttatgttcgtttttctaattaatatagtatcttacttacttgtgattgtcaattcttttttcacttttctcatagctcgttgggttcttcggcagacacgcccgaatgattcagaatatttcttaactataagcgtactataacaccttttctttactctgtaaagaaaaaaagtacagaatgtcctaacgacctcctgcactttcttctatcttgaaaatctattcaggattccctctcgaatccgaatcaactgctttggaagtgcctcccgcttctcacgatagaatgcatttgcaaaatcaagtgtaaacagcaccgccaaaaatcctccgagcgcttttcctgccatcatcggaatcccgtttacgaatccctctacaaatttatgcagaaatacaaataatccaatcgtataaaacccccatgcgattgaactttccagacagagaatccctttgtaattgaatggcttgtccgtataatcccaccagatctctccgaaaattttattcatcaatactgctgtgaaatattccaaagtcgttgcaagcaaagatccaaagaaaaataatttccaaagattatcactgtatggcttcaataaaaaaaatactgtcaaagctcccaccccgtaaatcggacagatcggtcctcttgcaaatcccctgtttgtaagctttcggttgcagatcgacatataaatggactctaccagccaaccaagcatactatacgcaagaaaccacagcaacacatgataaaaatcatagccaaaaatcactctgttccacattccttgttcctcttatcctttctctcttattttctctgtattctactatatctgactaaaaatttctatctctttcagaaagccttaagaaatttataactttttctataaaatctcctctgtttttacagatacaaccacttcctcaaacaccgctcctgtcactttttgaaaatcctgcggcgttaatctgatctgcattcctattttgccgccacttacaatcatttcctccaaggcctctgcacatttttctacgacaaccggaaacggctttttcatcccaatcgcagtgcatcctcccctgatataccctgtcacggcagtcagatctttcagcggaagcataaggagagatttttctccgacaacccgggccgctttctttaaatccagctcctcttcaatcggaataacaaatacataatactctctgctctttgcgactgtcacaagtgttttatacaccagctcatgcggttgtccgagcttatctgcaatctgtaccccatccacgaactcctcacactcataagtgatatatgtaaatgggattttctttttttccagtatcctcatcgcattggtcttcagctctttttttgccatttttctcctcttttcttattatttccgcctgtttgcttcttttgcagagacaacaacctctctcaatggctttcgaaccttttttcgagtcacttctacaagctgtaatcccgtcatatctacaagaattgtctggacaggatctttccgcaattctttttgaaacacttccaacagatcttttgtacactcttttgatttcaaattaataaaatcaatcagaatgatccctgagagattgcggagccgaatctgctttgccgcttctttggctgcttcgaggttgattttcatataaacttcgtcatctttcttacctgcaatacattttcctgtattgacatcgatcaccgtcagcgcctctgtcggctgaatcacaagataagcgcctgatttcatccacaccctctctgatagcgcccgtgaaatgacagactccagcgaatataacttataaagtggtagctgcctgtcagcataacatacaagcttttctaaatcctctggctgctctttcgccaaatattgctttacatcttcaaaaaggctctcctctacaacaatatctgtcaatccttcctgataaatatcacggatatttgatagatatgtaaaaggggcctccaaaagacaactaaataccttgcgtgactgcgcgatctcaactaaatgcatgtaagattctgctagctgccccaactcttctttcacaagatctgccggaatatctttggcatttgtgcggacaataaatccatatctttccgatcggagaacttcaacagtctcctgaatctgtgcccgcttttctcctgtgatcttggaagaaattccaatctttttgataccagacgttaagacaacatacttccctgtgaaacttaagttggaagtcactgtcggcaccttcgttttaactgcctctttctggatctgaacaagcagctcatccccgatacagagcggctttttcccgactttctgcgtgaaatgtggggaaggattctgagggatagagtaatagcactccaccccgtttgcaatttcgataaaggcagcctgaatatttgggacaatgttttttactttccccacgtaaatatttccaacacggtacgcctctgtatctttatcgctgacatgaatttccaccacttcttcattttctaacacggctgtcacgacctgctctgctatttttgtgatcactaactttcttttcatattccgaatcacctatatccccagctggtctaatggtactagatgacgttgtccctcacttcccacatccgcatacacttccagacgatgatggcgcatcgcagtctcttccaaatctattccaaggaattttccaaatgcctgcataacaagctctggtttcaaattctccacgcttccagttgccacaagcatataaacctttccgtcttgttctctcatatcatagatcataggcttaatattgacatctttttcactctttttcgtttttttccatacgatgatctctggctgactccgaaaggcatcaatcttatcagcaagattttccactggatgttccattacaaactcagacagataatctgctgcagcgacaatcgccattccggttttcttcttatcgtctgagatttcaatcatattgacgatttccatcccttccaccattacttcatttaatcttcgaactgcctgcgcaaaatcaacagactcagacaattcaatatcgaagtattctccatcgcttgtcagacccactccaagcggatttgcaaacgacatcaccatgtgcggactatatccgcccgtaaatgcaattggaatttccgcccttctcattgccttttgaaaatatctcataatatccagatgtccgatgaatttcatcacaccatattttcgaaatttaattcttgctttcaacacagacacctcctccgtaaatcgccgctccacatcctgcacatttcattttgcagtttggtgtcacttcgcccttcatagcccgttcccactcgcgctgtaaaaatttctttgtcacaccgatattaatgaaatcccatgggaaaatctcatccatatctctctgccgcaaattataaaatccaatatcaacacctgtcttttcaaatgcttccatccatttctcattgtcaaaaaactcagaccatgaatcatacagacatcccattttataagcttctaagattacctttgatacttttctatccccgcgcgcaaaaactccttccagcacagtgacatctgcctcgtgccagttatatttcaaactctttctgtttaactgcgctttcatttcattatttacaatatgtgctttctggatataatcttccttgttgcacatcgtcgcccactgaaatggtgtgaacggctttggaataaagaaagaagtacttgcaacaatctgacattttccattcctctgatcttttggaatctgatagtagcgctctgccactttttcagccaaatgtgcaatctctttcatatcttcttccgtctctgtcggaaggcccagcataaaatataattttactctcgtccaccctccttcaaacgcctgacctgccccctctaaaataatctcttctgtcagacctttgttgataacgtcacgaagtctttgagaacctgcctccggagcaaaggtcagactgctctttttgatatcctgcactttgctcatgacatccagtgagaacgcatctattctgagggatggcagagaaatgttgattccttttcctttaaattcttcaatcagaaaattcacaagccccttcaattgcgaataatcactggagctcaatgaacttagtgagatttcctcatgtccggtactcttcaacattttgtatgcatactcttttaagcgctctaacgcacgttcccttgttgggcgatacagcattcccgcctgacagaaacgacatccacggatgcatcctctctgaatttccaacacaactctgtcttgagtcactttgataaatggcacaactggcttctccgggtaataggtgtctgtaacatttagtaccatttgcttttcaatagtcggcttcgcgtgaacattattcggttcaaaagaggcaatcgtcccatcgtcatggtaagttacatcataaaatgccggcacataaagtccaggaatctctgctgcgcgctccagaaactccctcctgctgcttcctatctttttatgctctttgtacgcatccaaaagttcatcgtagactgtctctccttctccgatataaaaaatatcgaaaaagtctgccaacggttccggattgtaagtacatggacctccgccgatcacaatcggatcttcctcgtttctttcactggcaaacaacggaattccacttaagtccagcacctgaaggatgtttgtgtaacacatttcatactggatcgtaattccaagaaaatcaaattgtttgattggatcctgagattcaagcgcaaacagaggaatcttcttttcccgcataattttgtctaaatccatccacggcgaatacacccgttcgcaccagacatcctccctccgattaaacatatcgtaaagaatctggatacccagatgagacatcccgatctcatacacatctggaaagcacatagcgaaacggatatccacctcgttcttatctttcatcaccgagttcacttcgttcccgatatagcgggccggcttctcgatttttagtaatatttcatcacttaaagctagttttctcatatttctcctttcgtttttgtctaatatataccaaaaagtaatcttcttttctttttcgattttcacgaaaaatagctgttttttttgattttcagggacgcttttcagtatgaaaaatgctgtttttcacctgatttttgcccttgcgtaacaaatttactttttttctactgtgcaacactatgcataattatacaccattttcatagtcttgcataaaatacatagcactgcataacataattcaatactataaatcacttattttgcaattaaattcttaaaaattttgtcctgctttttctatcatttaacaccctatatgagaatatgatattatttgatataaagcagcagataacattctgagacagcatgctaacccatcatattatatgctttttgcagaaggagttcaagcaaattctggtttatcttctccaagtttttcaaacaactgcatattttccttttttcgaatttctaattcttgaaaaattctgaatattgtaaccctaaaatttcacccttgcgtaaacctacaaacaaagccagtaaaatctctaaataaacagaatggtattcttacgccgcttgaagcaatgtccgtatctgctttttagaataaagtacctatttggtaggtgcttatatgctttcttttgccataaagcaccgtaacataattgatttgtgtgtgtcaatacctgcatctatgtttgtaaacatggtttagtttccttcatctaaccaatgggcgaagaaagacttgggaatacgataaatatttccaatttttataactttgaatggttaatctgaattgaatttattaaaacctaaaaaatctttccaaccacccatcataaatgttaaactgttttttcccaaagtcaaaaatgccaatgcccgtaaaacgcccttatatttttcactatccagacaaatttcatattctccccaaaatatgttttgctgtagaccagatttttgatggtccgtttttgctttgcatattatattctacgtaggataatcctgctttcacatttgctttaatctcctgttccaccttttcttgaaaacaaaaatcaccaagacaagaaaaaatatcatctacagtaagtggataatcaattctgctcctttctttataagaaaaggcagaagaatattctaatccctctgcctgtgttgctattatcttaagcaaacaaattctaccatttcctgtggataatggatcctcccttccccctgacattgcacaatcttccctcctctccagtcaacagtaaaaaaggagtatccgaatctgtttttttctttccattttattttctagtttttgatactcccgaaaaatcttgtcgtcaacatctttaaaattttttgaaacagaacgtatcggcttttcactccacgatttagaaataacgatattacttctaaactattctcccaatcaaactatctttgtccttgtaattgttataaagtatgtactaattcaaacaatagcatcgtaatatcattttttgaacataacgattacatacaatatagttctatttaaaatcatctttccttaaaagagaaaaatttttcgaaataatttaatcttatatttataacacaaagcgttcagaatttttattcatctaaacacttcttcatcatataacgaaatttgtgccaaatcatttaataaatcctactttacatctaaatttaggaatctatcgaccattcattataatcgtatttttcctacctctaaaatttttccatttaatctttgatggaaatataatacttctctttgaatatatcctttaaatttacttgtcgatatgtttcttttctataagtaataatgagacatgttctatttttcccaccatgtttttcgatattcactaggcgtccgcccatacttttgtcgaaaaactctattaaatgtcctctggctttcaaatccagcttccagataaatatctgtaatccttctatccgtattttccaacaaagaggtcgcataattcaaacgaatttcatttaagtattggttgaaatttgtatgaaaaatacctgaaaaaatttttgatagggcaaacttattagttcccagagctgatgccactttcccaagtgtaagttcctcttgaaaatgtgacaacagataggtcatcgctgcatatatcagatcattactccccacactgtctttttctatgaatcggaatgtttccctgcaccggtataatataatctgcaaataagcctgccccacaacctcactgactttctgatcttttatcagacaactcagggcgtttttaacttctctatgtaaatctgcgctggcaatcaccgggttttccggacatttcttctgaagaagcgccataaacggaccacttagttccaaagaagcatgaaactggtacacctcattttccccctttgaaaacacctgataatgatgaatcaaatctggaaaaacaatagcaaaatcccccttttccatatgatacaactcatatccaatgccaagctccacctctccttttgttacatataccagttctatggcattgtgaaggtgagggggaacatgatgtggttttttccttatcatactgaacttttcttttttctcttcataagacggctgcatgatatttctttcccctctcaagaattggctacatttctttttgatatggcacgcaggttttctgcccatccgatataataaactcagtaattaggaaaggaggaaaaccagaatgaaaaaactgatgaattacttacagaaagtcatgaatttttatgcggtttacttcaatcatgcataccgtctttcatagacttttcctgtaaaagtttctcatttgccttctctacattcatctttgccataataacggtaatgataagcgtgattactactggaatccataaatacatgatctgcagcatctggatacaggaatcagactgtacagccagtgtgccgtcaaagccactgaaatccagaagccagccggtaatggcaattccaattccaccgcccagcttaataccaagagaagtacaggaatacatggttccgtctactcttttatgctttgtgagatatgtatattctgagcaggaggcaatcacagcattcatatccccctgccatggtcccataccaaaagctgcaatgccagtaaatagaagcatcagtggcacacttcccagataaccggctactacgaccagggctcttccaatcgttccaatcacgtatcctgtaaggttcagtttatacattcctctccacttttccaccagcatcggtgtaatgagcaatgcaataatcagtggaatattaatggcccaggaaaatacaccatacagattttcattgaacaggatatacgtcatatagtaaatacccatattcagcatagcagtataaatctgctgaaggatataggtagcacagatcataacatagtatttattggtaaacaacagttttgcagcatccagaagggaatatttttcatcatttccggattgtttcccatcatttaattcttcttccgctaattcctttacagaaagtacagaaatcgtattgacaatcaatccaattactgcatagataatcgcaaccgttctccagccggcagctccgccacccatccattctacaaagccaatggtcagagactgaatcaacagacttgtggaaaaagcaaaaatgaagcgataagaacccatctgtacacgttctttactattctttgttaccagggctgtcagagcagaatacgcaatattattcgctgtataaaatactgcatttagcagtgtatacgcaataaaaaaccaggcatactgtgcaaattctcccatatttgcaggtattgcaaaaatagcgactaaggttacggcacagccaatatagccatagagcatccaaggtcttgcttttcccattttactctttgttttatcaatcagggttccaaaaaaaacatccgtaattccatcgaataacttagatacggcaatcaaggttccaataattcccggatttaatcctactgtattggtaagataaatcatgacaaaagaggacaggagcgcatacacgacatttcctgcaatatccccaaagccatacccaactttgttataccattttaaatacgttttctctttcatgtgttcctaccattccttcccaaataaaaacttcatatcaaacgtaaaggtttcttctgtaaactggtactctttccgtagttccggaccacagctgttggaaccaatgccgttctgtgcataatccagacagacaatggtacttcccgatttttccaattcaaaattgtgtgcctttctcgtcagttcttcctgtgagtaataagacacattgaaggaaaacggcctggaagatactgctgtaacggtctgattctccttttccaacatcagataatcacaatctgtatggcttccattctcctgcgggcagatataatcttcatgctgttcctctaccgttgtatcatacaatccatggctgcaggaacggcatttatcccgataactttcgtgcggtcccaatccataaaatttcagattttcatattctcccctcaaaaacaggcggatgccaaatctaggaagctgcggaaattccctatcctttttgacgtgcattttgacagatatttctcctgtcctgtaaatcttccatacggcctctatatccaaaaccttctgaattgctactgcagccacggacaccgtactgtaaatccgaattccttccccattcatttcccaatgagtatcataagccctggctttgctccggtcatatccggcatctatccattcttgtttgatcttccggtcattatccgtaggtgctctccagatattcagttccataggggtttccagaagttcctctccatctacacttaattgttcaaataaacccgaaagtttattgtaaacatagaagaatgtatctgaccggatggaaagaaaacgatctgtttcagaaacctgtacctctgcttctttctgttcctgagtttccaacaaagctgttgcctgctggtttcttccatcctgatttttcaaaaggatttcatcaaatcccatcctactgccctgcgccataacactggtaccgtgctttaaatgataagatactttcaaataacattttccgctgtctggaacggtaatatccaacaaaatagttcctttcttgtgaggcagtacagactcctgcaaaatgaactgttttttctccagcaactttccgtcacagtttacttcgtataccaaatagatataatcctttaaatccacatagttcatatagttttccagacacagctcccctgttttctgacagaaagacaccactcttgccggacggtacacattctggtattccaaaagccctgtatggggtgttctgtccggatataccaagccgtccatacagaaattcccatcatggacttcttctccaaagtcacctccataaaggtacttttcttttccattagcagcctgtccctgataaatggcatggtcgcaccattcccacacaaagccaccgcagaggacatcatactcataaattatttgaaaatagtcttctaaatctcccggtccatttcccatggcatgacagtattcaatcaacaggagaggtttgtccggttttttgtccatatattcctgaatttcttccagggaaggatacatccggctgaaaatatcaatgttactgtaatcatatttccttctgtcgctgcgataaaaagaactttcataacaggtgagccttgtagaatcaaacccttttgtccattttaaagcttcctcaaaagtacagccataaccacattcatttcccatagaccagataataatacaagggcggttcttttccctgtgtacacaaagttttgtacgatccagagttgccgggataaattccgggttgtccgagatccgttcattccatttcctgcttacattttcccaattggaatcttttaaatactgggactgggttccatgactttcattgtctgcttctgcaatcacaaataatccatattcatcacagagctggtaaaaataaggcacattcggataatggctgctgcggactgcattgaagttgctttctttcatcatctgcagatccttcttcatctgctccagtccaatcacaaaccctgttactggatcggagtcatgacggttcacccctttgaatttgatggcggttccatttacataaaggactgcatctttgacacagatttcccggaggccaatccggtctgtaatcacttccccttccgtttccagaaccagagtatataaatacggctgttccggattccacagatttggctcttttacaagaattactgctttatgtgtataaacagtacctgtattttcctgaaatacctgagaagcaatctccttatgttctgcatcatacaaagtaagttttgttggcactgcctttccctgataactagcctgtactgtaattactgcctgttcctcctggatttcggtagttgtaaagtagtcatagaccacattttccgggcggttcacaaaatacacatcccggaagattccactcattcgaaatttatcctgatcttccagataagttccatcacaccatttcagaaccagtaccgccagcgtattctccccatttttcagaacttccgtcacatcaaattcacttgtggcatgggaaacctgactgtaacctacatactttccatttacccagacataaaagcaggaatccaccccttcaaaattcagatatgctctgggcgcctcctctggtatttcatagtaaaatttcctgacataggctccgcatggattctcctgtggaacataaggcggatccagtggaatcggatacctcacgttagtatactggtggctgtcatacccgtaattctgccacacccccggcacctctacctgtgtaaatctgctgcagtcatatccttgttcgtaaaatttttcctgcaaatcgtagatactgttaaaatactgaaactcccatgttccattcagacagataacccgatctgaagaaaaacgatcctctaccagtggtcccatatcatgggaagctggcatataatatgctctgctgggcatggtgttttcatgcattatttttaagtcctcgtaatgtcttggcacgatcataatattttccccctttatttttatgatttttcctttggtttatcattattttacgctatttttacactattcgtccataaactctattggacaaaacatgcacgaaatgatacactatctttaacagaagcctacttgtttaaaggaggtgcgagacgcatcatgtatatcaactctggttatctgcataattcattattggattttaaagataagagcaaatcactagtagtgggaagctgtgggacataccggctgatccaccagcccaagcttcccacgtatcgcccccggggaaggattgactatcaattgctttatattgctgcagggaaaggtcatttctttttgaatggcaaggaagagattatagaggccggacatatgattttatacaagccacgggaaatgcaaagatatgtttattatgggacagaccagacagaagtttactgggttcattttaccggtaataatgtaaaaaatattttaagagaataccatttgtttgaatccggacagattatccagactggaaactctacggaatatcatcagattttccgaaaaatgattcaggaactccagcttacccgtcctcattatgaagaatacttatctctcctgctcagggaactgttccttctgattagccgccaggctcctatgggcatctcttaccagaaccggatgttgcaaaaagaaatggaagaagctacacagtattttaatgaacattttgcagaagaaatatcgattgagcagtacgccatggacaaacacctcagtatcagctggtttatccgaagctttaaacgttacaatagcgtaactcccatgcagtatatactaaatctccggatcacaaatgcaaagacactgctccggactactacatattctgtatccgaggtggcatccatcgttgggtataataatccgctgtatttcagcagactgttcaaaaaacagacgggacttcctccatcggaatttcggaataataagatttaggaaagcgcatagtttcaaatcaattttatattatagacgtaaaacttctttatatccaatctgctcttccaaaaatgtatttcccgttttttgttttgccataacgcttctcctaaaaaaattttattctgccatactttacctgttctgaaaaggccgtagcgtttaaaatatatccctccaacgaatcgcaagaaaaaagcaagaatataaatctgtcattttcacaactctatgttaaaatattcttactcatactacgaagggaggaatctatttttgtcgaaagcaacactatttgacagccgtatcaaaaaatacgcttactgtaagccgccagaaatctaccgggatcttggtacatctgcccttgggctaccgtaagacggaatggggaactacgggaaatccccggtgaagaattagtagtaggcaatctgattctgttttctgctggtgatcgtgttccagcggacatccggctgacaaaggtaaccgatctatttatttcccaggccgctatcactggagaaagcgccattttggaaaaaagctgccgtacactttgttacaaagaacaagaacccataacacaattggaaaatcttgcgtttatggcgaccacagttatcagtggaaaaggggaaggcatcgtgctggctgtaggaagggatactctatacggtggatttaccaaacctaattctgaagataaaaatgcttttcaaaaaggagccaattccattgcctgggtcatgatccggtttatggcagttctggttcccattgtatttcttatattggggatcacagatggaaagtggctggaatcctttgcattcgcactctctgtagcggtagggctgatgccggaaatgctccccatggtcatcactgcctgccttgcaaaaggaagccttgctatgggtaaaaaacagaccatcatcaaagatctgaacgccatgcagagctttggaagcatggatgtgctttgtatggataaaacaggaacactcaccaatgaaagtatcctgctggaatattatatagatattctgggcaatgaaaatacagatgtcctggatctggcttatctgaacagttcctatcattccggcgtccgtaatcccattgacaatgccattcttgcctgtaaatccatgccaggcagggaaatccattataccaagcttctgacagaatatcagaaggaagatgaaatcccctttgactatactcgtaagtttgtcagtacccttgtgcaggacagtaccggaaacagccatctgattatgaaaggggatattgcacacatcctttcccgatgcagtcatgtagaatatcggggaacacgacttcctatggagaaagatgccagacaaagcgtattttctgtggtaggggaaatgctgcaggatgggatgaaggttattgctgtggctcggaaacaagtgggaaaacgaaagaaaatcacacctgacgatgaaaaggatatgactttggttggttatctgtctttcttcgatgccccaaaacagacggcaggcgaatccgtaacagcactgaagagattaaaagtaatcccgaagatcctgaccggagatcagacagccattgcaccatccgtctgccgccgggttggaatctctgccgaacatatcctgaccggcacccaactggatgaaatgacagactgtgaactgaaaaaggtggtagaagaaacccatgtttttgcagagcttactcctggtcagaaagtgcgtctggtttctgcactcaaagagaatggtcataccgttggatttcttggggatggggtcaacgacattcctgcactaaatgaggcaaatgtagggatttctgtagatacagcagtggacgccgccaaagatgctgctgatgttgtattgctacaaaaagacttaaatgtattggaacagggtgtcctggaagggcgaaagacttttatcaatatgttgaagtatattaaaatcactgcaagttccaactttggaaatattttttccatcatttgtgccagtgcatttttggtcctatatcaagatttagtacaagttaaaatgaggttttcctcatcttaacctgccagctgcaattcgtcttgctgaagcctacgatacagctcttcataatcttttggtgacatataatcacagtgactatgaattcgtttcgtattgtagaatgcttccaaatattcaaaaatcaaacgatatgcatgatcataatctcgaatcttaaaccgattcagccattctctcttaatcaaggaatggaacgactcaatacatgcgttatcccatggatatgcctttttagaataactacactgcatggttgcggttacacgtttgtattcttttgatacatactggcttccccggtctgaatgcagaattaaaggcttatcgatattgcgtcttgctttcgctttctttattgtttcaatcacgcaggatacctccaatgttttggaaagtgtccaggcaatgatttttctggaatataagtccatgatactggtcagataaacaaatccgtctatcgtccagatataagtgatatcagaacaccaaacagcatttggacgttctggattaaactgttcatcaaggatattttttaattcgctgctgaagtcagaatctttggttgtgatcgtccatggcttgacccactgggctttgatgcccatttgcttcatatacttaccaacagtacgttcggagatgatttctcctgatttacgcaattccttggtgattttaggggcaccataattctgtttggattcatcgtaaatatcctgaattttagcttttacggcttcacgtcttttttccgtattagaaggaacacgttttagccacgcatgataaccagaacgagaaacgccaagatgtttcaacattccggagacagaaactcggcgcttcgccttatgggcagtttctgccatctccgtaactttgagataaatggcttctgtcattttcccagaatgttgattgctttttttaatacttcaagggcatcctgtgcatctcgtaattctcgttttaatcgtgcgatttcttttgcttcatcagaagcatagttaccggaaccacgactttcaatatcacctgtttcgcgcagttctttctaccagcgtgataatgtctgctgactgattcctaaatttgtagcacagccctgcagtcctaagttcttgtgatcatgataatactggactgcatccagcttaaattgtttgtcatagtgttttgccataatgagctcctccttcagtgcggtacctacattgtaccatgatttttcttataaggaattctcattttgacttgtactatttatattctaacaccatatcactttaaaaagattaatttttttggataaatcttgtaataattgtagcacacacggctctattcgttgttccgagaggcatcaactctcctgtctgaccgtcacctgaaataatgccagttgccacacaccactgcaatggttcttttgcatatttacttacattactgttatcaggaaatttagacaaatccgctctgttagatacgtcataccccttataatttgcatatcgatacatcatagtagccatttcctgacgtgaaatattgtttgccggtttaaataatccagaatctgagtatcccgtaataattccattttgatatgcccaaatgacagcgtttgcataccactcaccttctcgcacatcaccgaatttactttcaaatgtaacatttggttcaccttccatacgataaagtattaacgctaactgtgctcttgcaagattttcacttggtccaaactgagttttatttagacctgtcataatcttattatcgtatacatactgtgcactatctcgataccaatcacctgcattaacatcctcaaatatgttttctactaatatcgtttcgtctggctttggatctggttgaggttgtggatctggctgaggttgtggaagaggccctggcatctctccttttttataactaactgtagcctgcacccacataaactctggatctggtacatcatattccggcatatccttatctgttattaaatacgcataatcaaatgtttcttgcttttcatctggtaaaacaaccattccagtacttggattatatgataaccaatcatctactacgctcacatattgcaaatattccattggtatcagttgatttaaaggaacttgccattttccatcaatcatccaggcattgacatctatatgctgccaacttgcatataaaacatctaaatcaggttgatttctaagatttaaatatggaaaacgagatccttgtacaactatatttgtcaacttagtgtttagagagaagtctatcggattcacactattgttttcacaataaaatctcttcaagtttttattgtgacttaaatccaaattttctaacatagtatttgagcattggaaatgttctagtaatatattccgacttaaatcaatacttttgattttcgtttcatcaatcaataattgctctaattgagtcaatgtgctaacattcaactccgttaatgattgacatctttgcacggttacatcttttagcttgatattgtgactcaaatccaaactttcaatactagtttctacaagggatacgctatctagctctgtgagatattcaattccttgaacactttttatatcagtactactacaaacaagatctttaatccctaaaatttcataattagataaccacccatcttttggtgtgctacccgtcaagaggacaatgaaaaataataaatttttctccgtcagcctattaaccggctggcggtatttttatgctgctttcaacgtaagttcatgaaaggccatcggtgtcattatatgtaacttacgctgtagtcgtcggttgttatagtattcaatatagtcttggatgccttggattaattcttcttttgatgtaaagcgtttcccataatacatttcccgttttaaaattccccaaaatccttccattggtccattgtcaatacagtgtgcaactctggacatactttgtttcatatgatgtttcttcagccgactataaaatgcctgactggtatattggaatccccggtccgaatgaaaaagcggatgcgcatcaggctctgccgttaccgcctgatcaaatgtatccataacaagggcattatcattatgcgcgctgattttatacgagacaatcctgcggtcgcacagatcaagaatcgcacttaaatatattttgtgtacttctacccctatataatatttgaactctgttacatctgtcagccatttctcattcggtttatctgcgtgaaactcccggtgaagaaagtttttcgcaatgtgggagggattcctgtctgctttcgtacagctcttcggcttccatttgatagatgactgtattccgattttccggcagattctcagaatcctcttatcattggccggaatcccataatttacagccagttcatcacggatacgccgataacccatatctggatgcagccgatgtatttccctgataatatcggcaatctgttcattcctgatctcattgtcacttttgggatgtttcagccatcggtaataggaagaacgagtaattccaaggtatctgcacatttgtttgaccggatatccttttgatttggacagttccctgattgcctgatattcacataatttatgtattaaagaaagcgatccctcctttctaattcccttactttttttaacaggtcattctccatctgtaagtctttatttttacgttccagctctgcgatacggtcccgtaattcttcttctggagtgcggcttggcttagagccgatccgccggcctctccgatcctccaaaccggcacttcccattttttcataccgttccacccaatttcggacctgctgataggaacaatcatacttcaaggccattgccccataattccggtcatggtcaagacagtcttttacaatgcagattcgttcctccagtgttgtttttcttgctttcttcatagcgctacctccggtaagttcttttaattccttaccttcattatacgccttgatccaacttgaaagttgagaatgctgtcggattccgaattttacacatatttcatctaacgatccctctccggaaaggtatgcatgaactgcctgcaatttcaattcttttgagtagcgtttatttgtcttaggagacagtaaactttctggtccgtctgttttatagatcctgattcaatcctgaacactccgcttatttacaccgcacatttttgcagcgcctttttggctaagttctccgttcaggtactgttctacgatttctactttttttactgcatcaattttactttttctggacataaaatacccccaagtaggtttttatatttttgtgtcctacttgagggtatcatatcatttctctctatctacacgatctgttccatcatagttttccatttgtttccgaaaagcatcatctgggaaatgctccttatctaatggtacaactttttcaaattctaaatccaggccactttctggaataagaagatcacttgcatatgtaggcatgctagatgacaacatcaagcctcctaatacaactgctgcaacttttttaaaaatatgtttctctttcatcctttgtcttcctccttttttgttagaatccgtcagttattactttacattttacacctattatttgacaatatcaaccatgtctacgattatttaacatttcttttttgtaaacattcaatagaaagtaagttgtcccctatctttttaagatacacaaacaaggaatccgctaatatttttataaccagttgtcgctgcacaagcctttttcagaagataactttctaccaatcgaatcctcctatttgccatgttctgacgtgtgctggtaagaccatagtgagcgaacttttactctaatcgataaagcaaaacagcttttacatcccttctattcatatttcatctataacaccaattcttttcccactaagatcttcatttgaaaagtgaattcctcttgatcaaaccggtattttttctgaagacgggggccacaactgttagaaccgattccattttgtgcataatcgaggcagacaatggtgctacccgacttttccagttcaaaattgtgggcttttgctgtcaattcttcctgagtatagtaagacacattaaaagaaaatgttgtcggggagactgccgcaaatgcttgatttccttttttcagtaccatgtaatcacaatccgtgtggcttccattctcctgaggccgaatataatcctcatgctgttcctctacggatgactcataaaggccatgactgcaggaatgatatttatcccggtaactctcatgcggaccaagtccataaaatcgaatggtctcatattcccctttcagaaataggcgaataccaaatctcggaagttctggaaattctatgtcttttctcacatgcattttcacagaaagttctcctctaccagaaatctcccacgccacatcaatctccaggactttttgtaatgccaccgctgagacagataacctgctatggatctgcaccttttcttcctgcattgtccactctgttttgtacgctctagaatggctccgatcatatcctgcacgaatccattcgtctttgatcctccggtcattgtccgtaggtgctctccagatatttaactccatcggagcatcaaactgttcttttccgtctatagtcacctgttcaaacatccccgaaagcttattgtaacagtataaaaactgacctgtctggatcaaaagcaaacgatctgtctctgaaacatgtatcgatccatttctctcctgcatcgctaagagtgccgccgcctgccgattttgtccgtcttcattcttcaaaagaatctcatcaaatccaaggctgctgttctcttccatcaagttcgttccgcactttaaatagtagcctattttcaaataacattttccactttccggaacagttatcggaagagaaatcttaccttccatgcgtggcaggatagactcctgcagtataactttcccttgttccgtcatgcttccatcacatgtcacttcgtaggtcagaaaaagataatctttcagatccaccgcattcatatagtttttcagacaaagactgccgctctcctgctcaaatgagaccactctcgccggacgatatacattccaatactccttcaaacctgtatgtggtgtccgatctggatacaccagtccatcgacacagaaatttccgtcgtgtacttcttccccaaaatcaccaccgtaaaagtacattgtcttcccatctaaagtttctccgcgatacactgcatgatcacaccattcccacacaaatcctccgcagagcttgtcatactgatcaatcttgcggaaataatcttcgagatcccccggtccatttcccatcgcatgacaatactcgatcaataaaaacggcttctccggattctgctccatataggtgtcaatctcttctaactccgggtacattctgctgaaaatatcaatattgctgcaatcatacgttctcttctcactttgataaattgaactttcataacaggtaagccttgacggatcaaactgctttgtccattttaatgcctcctcaaaggtacatccataagcgcactcatttcccatcgaccaaatgaccacgcaagggcggtttttctcccgatgtacgcaaagttttgtgcggtctactgttgccaaaataaattctggattatctgcaatccgctcattccaacgcctgcttgcattctcccagctagaatccttcaaatactgagcttccgttccatggctctcattatcagcctccccaattacgaagaatccgtacgcatcacagagctgataaaaatacggtgcattcggataatgactggtgcggatcgcattaaaattatgctgcttcattaactgcagatcctttttcatctgtgctgccccaacgacaaagcccgttaccggatccgaatcatgtcggttcacccctttaaatttcaccggtgctccattgacgtatatcactgcgtctttgatacagatttcccggattcccacccggtctgtgatgacttccccggcactcttcaaaaccattgtatacaaatatggctgttcgggattccacaattttggttctttaaccgaaaggattacctgatgtgtatagccactcttctccgacttcacaaacattccacaggctacttctctattttcctcatcacaaagcgtaacctttaccggcacttcctctccaatatagtttgcccggacagtaacagttgcatcagaccttcccaatgtagttgttacaaaataatcgtagactacattttccggtcttcttaacagatagacatcccggaagattccgctcatgcgaaatttatcttgatcttccaggtaagttccatcgcaccatttcaaaacaagtaccgcaagcgtattttctccgtcaagcaacacatctgtgacatcaaattcacttgtagcatgagaaacttggctatacccgacatactttccattgatccaaacataaaaacaagagtctaccccttcaaaattcaaataggctcttggtgcatctgcctgtttcttgtaatcaaatttgtacacatatgcgccacatggattttcctgaggtacatacggcggatctaatggaatcgggtatcgtacattggtatactgatggctatcataaccataattctgccagtttcccggtacctccacctcccgaaaacaatcaagatcaaatcccggttcataaaatctgtcttgcagatcatagagactgtcaaaatattggaatttccaccttccattcaaacagattgttcggtcggaagaaaatctgtcttccaccaacggtcccatattgcaggaagccggtatgtaataagctctatacggcatggtgttctcatgcataatttctaagtcctcgtagtattttggcactaacatcacaaaattctcctttacctttctagtttttctccgctttaacgtgagtttatactttttccactgttttgtccatacactctagtttgaaaaaatttcttatttttcttccttcttctcctcttttttcagaaaaagcatacaccctgccgaagcaaccggcacagtcaacagacatgcaatcgcgctgaaaagcatcgcagacactccctgaaataacattttggaatttaaaattacttctgccgtatatttcacatttttcagatagaaaaagagcagtaaggaatctcctaagtaagcgaagaacaacgtattcaccgtagtcccaataatgtctttcccaatctgcagtcccgaatgataaatttcacgtctactcatatctggtttgtgtaaaatcacctcgtacaaagaagacgtaatagataacgcggtatccagcactgccccaagtgtgctgagcaataccatacacacagtaatctgaagcatgttaatatgcagattggtattgtaataatacatcacatcttcctggattgcctgtatttcatttaatccaccacttcttgcatcccacaaaagcagaaaaattgctgcaagcaataacaggataactatcccggttgctccgaatgcaatctctgtcttctgatttttcccattttgttttaccagtgtaatataactgatcagaccggctgcaattccagtaatgataagaggtgcatgcccgcctgccatcaaaatgatcgccagtgacaataccagcagatttcctgcaagagacataacagatactgctccccggtctccaccgatcaccatcatcaatccaaataaaatcagcgcaagtattcctatcatcatctttcattcctccgatcttttctaactttgccggttttcataaaaactgaagcaaaaagtatcgaaactggaattgccagtacaattccgatactttctatcagaaagcagcagatctcatatggaatatgcagacgaaggatcgtaaaaaaatctacgtcattgttcattcgaatcaaaaaggtcggaatctgactgcatgcaaatacaaacaagagtacattcatcattgttcccataatatcataaccgatctctcttcctgaacggatcagcgcccgcacagaaacagatggattcttcctcgtaatttctccgagcgctgatgaaatcgtcacagtgacatccataattgctccgagtcctgccaacatgatttctgcacgaaataattctcctggatcatccatacttccaagatattccatcgaagaataatcaagccctccggtataccgtactgtcagatcaaagagtcccatgatcagcgctaaaacacttaacgtagataacactgccgcccacgttttcttatggaatccattcaggatcacaagaggtattaccgcaaatagaactgtcataaatctacagacaacaagcacttctcttcctttcaggaaccctgtaaacccaaggaaaaaaattccaaaatttgccacaaccgtgaggatggtaagcatccctttctccttcgtaaccgcaagcagaaggaaaataagcgcccctgcaagcactgccaggtgggtatcccttttcaaacttttgatcgttcctttcaaagagtctccctccagagtcacgagtactttatctccctttgcatatttttgatccagtaccccggaataagaatattcattgttcagccgtactgtctttccttttttttctccgttcagcaaaattcctttgatgttttgcgtataataaggttctctccctccccgaacatcttcttccttcctgctttcctttgtatgcacttccgtaatcttaacaataggtgtctgatatacccacgcatcatttgccacaaaaagaagcaggcaaaaatacaataagattgcagcaaagattctttttcttctgacagacacattttctttatttttcttttcttcccacatcacactttttccttcatgatcactttttaatttttctttatcgtattcagtttttcactacttgtcaagtggcagctaaaaacctgtctttttctcaaaaatttagtggagagtgtgatctgatgtcattcacactctccactattatttaaaacaattctttttcatctttcttcttttttacaaagctgatcgcaacacaggccggaccaacatgtgtcccgatgatgccacctaccggatacaggtggtaatttgtcagaccatacttttcaacagtctcttccatgaacttttccccaatctccttatcggatgtatatccaaaatagaccggttccttctcatcgatttcataggattcatattctttccacagatacttcacgccaccttttcttccgcgtgccttccctaacatcgtcaattcgcgatccttcagttcaatcacaggtttgatctggagaacatttcctaacacagcaagtgctgccggaatccgacctcccttttttaaataggtaagtgtatctaacatgccgcatactgtgacgcgctttttcaaatcctctatggccgcaacaatttcttccatatttttcccttgagcacgcatatctaccgccttctgtaccagaaaacgctgagtaacaatcgcctgctcagaatcaatgatccagattttctcatattcactcatctgttttgcaagatttgctgcgttgactgtcccactcaatccgctggaaagagtaatcacaagcacttcctcatttttttcttttgcttcttcgtacaactgcaaaaattcctccggagacggctgactggtaaccggaagttccttctcttcagcaagcttatcaaaaaaatggataaaatcctcttctgttttcaatggaaaatctccatctgaaaattttgtctttaaccagacaatccgaatgtccatctcctctgcttcctgctttgtgatatccgaagcggaatctgtaataatcatcattgtaaaatttcctccttcaacagattgacaacctctgtctgattttctaaaatagatgatacaaatatatcaattaaacaatatagcatatctgcaaaaaaaatcaatgcagaaacttacaaatgaaacaaaacaggagattttgtatctatgaaaagaacccaacgcacaagcgattttctaaaggaatgcattgccgattcgcttttaagacttctgcgcacaaagccccttgaggcaattacgatccgtgagatcactgaactcgccaatgtcagtcgtgtcacttactatcggaattttacttccaaagaagaagtgattgaatttaagctggacaaactaatgacagactggattgaacacgaaaaaacaatccggaatacttctgcctgtgaacttgcaatccgctttttccagtttttctactccatccgggatatcgttcagactctgattcaggcgaaactatcacttttgcttctcaacgcactcatcatacgctttggcgacgtttttacacaagactgcgccgaatattatcgccagattttcatctccttcggactatgcggagtgattcttacatggatggataccggtatgaacgagtctccggaagaaatgggaaaaatcgtcacggaaacatttttcccgcaagaacagccttaacttactttaagaactctcccataggttgctgatatgtaattgcctctatgatttttgcactatcgtatgttccaacagaagttttctcataatcgatccccgcaaaaatcaaaaataaaatcagactgacacagacacgcagcacaaaagtagaacggggcagtgcctcttctttctcataaagttgatgatacgctccctggcagcgcggatggatcgccggattggatgttcgtccatttccatatagatttcttgcctgtgcaagtagttcttctcttcttttttctgtctcattcatacgagtctctcctctccgtcccgacatgtttgtagttgctcctaaaacagcgggcatacacttcttttataaagtgtatgcccgcttaatttctgacagaccagtccatctgttatctctccgcaagttctttaataatatcttcccacttcacgcctcgctcaaccataagtaccatcgcatgataaaggaaatcagaaatctctcctttgatctcatccgggtttgggttctttgctgcaatgatcaattcagtcgcttcttccccaactttcttgagaatcttatcaattcctttgtcaaacaaatagttcgtataagatccatctctcggattttttttgcgctcaagaatcttctcataaaccgtttcaaacacttgaagcggatttgtgccgtcataatccgtaccgacaagcggttggaagaagcacgttgcattcccggtcttacatgccggtccgatctgttctacttttgcaagcaaagcctccttatcacagttgatcgtaagtgccttcacatattgataatggccgctttcctctccctgtactttgcttcttttcgcttctctgtcataataagtcatctttccggttttgatcgtattgtaaaatgcctctttatccatataggaaaacatcaacacttctccagtcttataactttgcgcgatcacaggaagaagcccctcctcattgaggtgaaactctgaaaactccatcatgctctcgaacgaagtcattttaatattttccttggcgcactgctctttaaatgcaacaaaatccattgtcgtccggcttacataagcgccggaaagtcctttcacacccggacatttcaaaattttaaacagttctgacttctcattcgtatctgtaagcaccacacacggaatatctgtcacgttcatgactgaatccaaatccagtctgtgcataaataaaatttcactgctgcactcttcgatcaaatgctgttgcttgaacagcgcatcaaaatcattgagagaaactgagattttctcctttccaaacctttttgccgcctcctcgatcaactcaaaggaaatcgctttcgaaaaattcaatactgcccgtttcgcacccgcatacaagattttcttgatatcttcctgccgcttgatatttcctcctgccaccatcggaatgcgtattgcccggctgatcttcttcataattgctattgcttcctcatgttcttcgtcagaagaagacagatcaaacacaaaaagttcatccgcaccatgatcactgtaatattttgccagagaaactacattttctgaaaggacttctctgttgtcaaaccattttactgccttcccttcatcgatgaaaatgcaaggaattaattttttataactcatttttacaattcgctcctttatcaatttcagaccgccttacgcacagtctacgacttttttctctcccgtgtgtaaattcaccatgatgatctgctcgtctctcctcagatagattaagctgcccgcctgctttctgcgcccatagatatgatataccgacagatttttcttttcttcccgttcaagcagctctactcgtttcccttttccgcggaagtccttcgcaagagagattgcgtacttcctctgctcccggtcaaagagcaggattatctgctccggttcctccggaatctggattttctgtcggatcagtgctttcatcagctcatctgtaccgattgcaaaccctgctgccggaagctctcttccgaatctttccatcaacctgtcataccgtccgcctttcgcgacaggttccccgcctccaaaagtatcgctcttaaaaatcattccactataataagcatattttccacacatgccaagatcaaatgtgatcatctcctgcatgtggtacagtttcaaaatttcataaacttcttttaaacgctccaaagcaagaattgcccgcctgtccggtgccagctctctcgcctcatttaaaatttccacacttccaaccaattctggaaggcgataaaaaacttctctgatcggacgctttaccggaagtttctcaagaagttctctcataccaaggaaatttctcctcgcaatcatcgtccgcaccttttctttgacttcggcagggaattgtgccgcatccaaaaggctttgcagaaattccacatgcccgacactgatctgaaattctttcatcccagcgcgcttcagactatctgccgcaagcgcgatcaactctgcatctgcccctgcagttccatctccaatgagttctgcaccaagctgtgtgctttcacacaattctccctgctgacttccatgatttaaaaatgtatttcctatgtaacacatcctaagcggtacagaatccttttcaaactgtgtcactgcaactcttgctaccgatggtgtaatatccggtcgcaatgcaagtgtgtttccctcccggtcaaaaaatttatagagttctctggaagatacgatcccggtgtctcttccaaatacttccagaaattcaaaagcaggtgtctgaatgtcttcatatccatacaaatgaagcatttcatgcagttcttcctgaagcaacaacttttttctgcactcttttccataaatatctttgactccctctggtgtatgcaaaatcttctgtctcatagccattctccccttctccttacaatttttacttatcttttggcatcattttttatcttcccttatcttttgtacttctttttattctctttcctctagatctttctgaagcgcatcaagatacggtacatatcctcctgccatctttagaaaaaagtgctccgaaagctcttcccttcgaatgctctttctgccgccggtttgcccccgctcccaaaagcgttccatctcggcacagcgcatataatacaattcattccgtctactgaaatagatcaataaaaatgcgaccccatcctgcttttcaaaatttttcataaattccacttgatgttcatggatattctgcaatgggaaagtatctgcattacactcctttgcatcaaaacaaaccgggatcccctgaactgctccgatataatccactgtactccgctgctcaaaatacgcaagcgtaatatgcctgtgttccttgtcaatccgcaccggggtgatcggtgtcggtatcttctgaatcaacgcaagtcccttctccagatatctctcattagtcctgttgatcatatcctccagcgtagatccccgaagccctctggaattccatgtccccatcagcgctcactccttagttctttgcagatttttgcaaacagcggtgggacgtctgcaataaacaccttctcagacagctgactgcaaactccctccatcaccggaaactctaaccggtacgcatggagcagctgcgatttcaatccatattttttttgataaaagtcgtttaattttcggtccccatatttataatctccgatcagcggatggccttctgaggcaaggtgcgcgcgaatctgatgcgtctttccggtaatcagccgtacttccagcaatgtcacaccctcttttgtccacaacggatgatattccgtctcaatcggctggtcagatgggtccgatggtctgtctaaaatctgcaccttgttagtcttttcatcctttttcagccatcctttcagatattggtcttctcggatcactccctgcacaagacatcgataatatttgtggagagttcgctctttgaaaagttctcccattttctgaagccccggaaggcttttccctgccacgactattccacttgtattgcggtcgagccggttgcagattgacggacggaaactttttagtgtttcttctgagagttcccctgcgtcaagcagatacgaaatcagatgttccacaagagaaacatcactttcctttgccttctgcgacaacattcctactggtttattgatcagaacaacatcttgatcttcgtagattacggataaatttgtttttgttctctgaatttttacgctggaaaatttccgaatcgtctcgtctgccaaaaacaattttactatatccccttcttccagtttctcatttccagttgctttctttccgttgaggacaatatttttctttcgcatcattttatagaaaaaactctttggcgcttcatttaaatactttgccagcagtttatccagacgctggccagcctcattttttgtcactttaatttcctgcatcttttttctcccgctctttttcaagtctgattttacagagaaatattcagaacaatgcctaagagcttctgttccctttcctcatttcgctcatgtcccagtgcttccagttcccgcagtctctgcaaaaatgtctcgtaattttcataaatcttgattgtcattttctgatagccgttctgcgataaaatctgggtaatatgtttctgggcatatgccggatctgtctttttgcttcttgtataaccaatcatcacatgatcagaaaccgtcatacagtcgatcggcatgattttctcatagcttgtcacaaccagatcatagacaaccggaagggtccttgctacccgtccgatctcttctgcttctttctgtcctatcgaatggtacggccacctcgtgatcacgccgacaagagattttcctgccggaagacatcccaagactgcaacgacagtcaataaatttttcttcgtatgtgtcgtcaggtaacccgtcgccatgatcgcgatgaccagaccaaacatcatcgctgtttttaaaatttcttttttcttctgtgaatccagataacctggtctcccttttttcattttctcacctgtctctgatttacttccagaaatgctgcatcacaccaagcacaaccttctgcggcaggacttttgttgcaatcctagcacttttcattgaaatgccgcaaacagacaattttttacctcttgccgcatcaagtaatgcctgccgtacaacgacttccggctctttcataaagttatcttttgcattttgaccatcttcttccgtacgagctacctcaaaaaattcggtgcgaaccggtccggggcacactgccgtcacaaagattcctctttttttcacttcctcgccgagcgcatccgaaaaacttttcacatacgccttcgtcgctgcatataccgaaaactttggctgtgggcagaatgctgccgcagatgccacattgacaattctgctgcctgtactcatatatggaagaactatacatgtcatataggtcagcccttcacaatttagacggaccatatctgcctgatcggtcgaagagatttcttccacttctccgactttgccaaatcctgctgcattgacgagcatacggacatctggattaaattcctgaagcgctgctgctattttgtcaaatgcactccgatgccttaagtctgctgcaaagattcttacttttgtcatcatcctgctctctacttccagaagtctgtcttctcttctggcaatgatccagatctcatccagttctttgtacagcgattcaatctgtagtacaaattctcttccgagtccggaagatgctcctgttacaattacaattttcatttttacactccccttatcttttactgtttcttataggctactgtttctttttatgcacgtttcggattgcttttttcttctgctttcctttcccctgtgctttcgcctgagactttccctgtgcctgctttctgaagccttccccggatccttgttttggctgtcttggacggatcagacaatgcctgtcatatcctaccagatccatacgtcccgcctttttcagcgcctccatcaccagatcataattttttggattccggtactggatcagtgctcgctgcatcgctttctcatgcggattcaccggcacatatactttttccattgttctcggatccacccccgtatagtacatgcaggttgaaatcgtcgaaggtgtcgggtagaagtcctgtacctgctccggcatatagccgagatctcttaaatactctgcaagctctaccgcctctttcatcgttgatcccggatgagaggacatcagatatggaactaaaaactgatttttccccaacttctgattgatcttcttatatttttcagtaaatgcctcatatacccggttctccggtttccccatcttttgaagcactgcatccgagatatgttccggtgccaccttcagctgaccgctgacgtggtgctcgcacaattctctgaaaaacgtatcgtctttgtctgccatcagataatcaaaccgaataccggaacggataaatactttcttcacatttggaagttcacgtaattttctcagcaattttaagtaatccttatgatccactttcaaatttcggcacggttttgggaaaagacactgcttttctttgcacaccccgtactgaagctgcttttcgcaggacggtgcacggaaatttgctgtcggtccaccgacatcatgaatatatcctttaaaatccttatcccatataaactgatttgcctccgccaaaagcgactcatgacttctcgtctggatgatacgcccctgatgaaaagtcaacgcacagaaattacatcctccaaagcatccccggttgctgatcagactgtattttacttcttcaatcgccggaactcctcctgcggcttcataggacggatgataggtccgcatatacgggaagctatacactctgtccatctccggctgtgacaaaggcttcgccggaggattctgcacaacatacagatgatccgaataaggttccacaagtcgtttccctgaaaatggatctgtattacagtattgtacataaaaacttcttgcatagtttaatttatcttttttcaactcttcataagacggtagcgtaacagcatcatagacactgctcagatctttcgccttgtacaccgtcccatcgataaaggtgatatccccgactgcgattccactctttagcgcatctgcgatctcaacgatcgatcgttctcccatcccataggagatcagatctgctcccgaatctaacaagatggaacgcttcagatgattcgaccagtaatcatagtgtgcaagccgcctcaaacttgcctcaatccccccgataatgatcggtgtttttttatagacctgccgaatcagatttccatagacgattgtcgcataatccggacgtttccccatgactcctcctggtgtaaaggcatcggtctttcttcttttcttagatacagaataatggttgaccatcgagtccatatttcccccgctgaccagaaatccaagtttcggttctccatattccataatgcttgtattatctttccagtccggctgggaaatgattcccacccggtatccatttgcctccagaatccggctgatgatcgccgggccaaacgatggatgatccacataggcatccccgatcacataagcaaaatctactgcatcccatcctcgttcttccatatcctttctgcacactggcaaaaatccttgattcattctttctacctcatttgttttaattgtgtaagttcctgttctgtcaatttccggtattcgccaggaagaagtttttcatccagcacaaggcttcccatcgacagacgttttaaataagtcactttctttccgaccgcctcaaacattcttttgacttgatgaaacttcccttcacggatcgtaagggtaatctccgactcctcaccggaagataaaattgtaagtactgccggaagagtcgctctcttttcaccaatatcgactcctttttcaaacaactccacatcttcttctgtcacggttccctctattttggcataatacttcttatccatatgctttttcggtgacaaaagatcatgcgccaatgccccatcgtttgtaatgagtaaaagtccttcggtatccttatccagtcttcctgcaggaaacaaatcctttctccttcgatcttcgataaggtctatcaccgtcttatctcttggatcctctgttgccgatacaactcctgccggtttgttcagcatataatattcatattggtgataagagacaatcgctccgctgcatacaactacttgcttctcacaatccactttctcttccggtttttttacaatcagaccgtccacggtaaccaatcccttccggatcatctgttttacttcacttcttgtcccgacctgcatatcagcaagatatttatctaatctcaacattatgactgccatctccatcctggaagatatttattcttcaccgttccggcagagagctttccccatcccagaggatactcatcgacacagatcagataccatcctttttctttcggtgagacaagatcttccacatccaacgtctctccttttaaatacttgaccacgcgctcatcttctgctgaaagacaaaggcagtacctgtattcttcctttttcaaattcatcgcaaacgcctggcttggctcaaatctgtttttcttcagttctccgagaagcagacccgtgcggaggaatcgaatccctctgacatccggcagatcctccggcatatagtagacgcactccccgtggatttccaaacggcttttctctaagtcccaactgacattttcaaaaaatgcttcgagttcctccggaatctttctcacacctgtcttcgcaattctgtctgcttttatccttctttgtctcgtctgctcttcgttttcttcctttggttgttcccctttctgcaacagtgccacatagtgtccttctccatgaagcttatgcgggaacatccgcacagttctggacaagtctccccgtttgcttctggaaacttccggaagtcccggacaaaatccttcgtacggtgcaatctcacaaatttgaaattccggatactgctctaacaaatattcgatcgtcccttcgttttcttccgaatcaaatgtacaagtggaatacagcatcattccacccggctttaacatcctcgctgcctgtgtcacgatacttctctgaatctttgcaaaaaattccggtccatgttcttcccatgccttgaccatctttttatcttttcggaacatcccttccccggagcaaggcgcatcaatcaaaatcttatcaaaatactcctcaaaatattcctctattttcccaggttcctcactcagcacaagtacatttccaattccaaacaattcaatattctttaacaatcccttcgccctggaattgctgatatcatttgcaacaagtacacctgtcccatccagcttcgctccgagctctgtcgcctttcctcctggggccgcacacacatcgaatactttatctcccggattgattggaagacgatttgccggagtcatcgcacttggctcctgaagatagtagagtcctgcaaaataatacggatgctttgacggctgtacatggtctccatcgtagtaaaacccattctcaatccatggaatcggcttcagttcaaacggagaaattttcagaaactcctccacactgatctttctcgtatttacgcgaagcccgtacaaacgcggctcatcataacattttatatattcttcatattcttcctgaagcaaagccttcattttttcttcaaatttaattggtaaattcattttttcctccaaatggtattatctcaaaaaaatcacccaatatattgtatcatattccattttattacaccaccccaaacctcagagaaaagtatcccgttcccgcgcagaaaaatacacttttgatgcactggtagtctaatgttaatatcgatatctcagctttttctgctctgcatacttcaaaattgcatacgggttgatactcatctcagttccatccggataaatataaataccgagatgcaaatgaaccggaaacattccttttgtcccggcttctccatacccagtatctcccataaatccaagaagctgcccggctttcacctgatcgccaaccttcaaatttgcataggaatccaagtgtgcataataaaaatacgcccccgcctcagtccagattccaatccggttcccgcctttttcaagccatccgatctttgccacagttccatccgttatactgatgattggatacagccctcttacattttctcccgccatcagatccgtcccctcatgtcctctttttcctccataatttcgctcttccatccatgaatctgcaaaggacacaaattttctgccaggcttttctgattccggtatcggaaaatacttcactgtattccagattgcgcggcaggtatttctgtatgattcataggaagggtttctcttccagcgtttttctctctcctgaaatgtttcaccggaaatctgccacgggaatgtttcgtatccgaattttgtctccagccagtagattccaaggtctctgccgggatcttctgctttctgtatgtaggactccatttcctccgccacatactgtctccgaaacgctgctgtctgaactgcattcgcatgcagtctttcagatttcccctcttcatagacttcatgcagcccaatctgacagaaaaatgctgccagaaacacaaacaaaatccgtctgatcctttcccgtccaaatactccctgtctcatactatctgccgccctgcagtttttcttcaccaccattctatgaatcttcctgtgactttatccgtcatcctttcattgcttatgatatttttcgcatccggaccatacttcctattttctaatctcgaggaacattggacataaaaagtaattttctcccatatgaataattacagaaaatctatttggacattcacaggaggtcatactatgaaacgtaaagctgcaagttttggaatcattctttttttcctcatcatgctcttgtgcccgcaggaagtattttttggagcaagcaaaggacttcttctctggtttcaaacagttcttccaacactgcttccatttatgattctgtccggacttttgatttctacaaacagtatcgtctacctggaccgaatcttcggacctttttttcgaagactcttccgcacttctgaaaacgcttcttttgccattatcgcaggatttctctgcggttatccaatgggcgccaaagttaccgcagaccttctccggcaaggtcgaatttctaagacagaagggcaatacttgctttctttttgcaataataccagtccgatgtttatcatcagctacatcgtctggcaaaattttcaggacaaatcccttcttgtcccgactttattccttttgtttttgactccgatcttatcaagtattcttttctatcctttttaccataaaaagcaaaagacttcttcgccagaaaaaaacagttctgacaacacaaaaaaacaggcaccccacatttgcatcaaatttcaaatgttggatacctgcattatgaatagttttgaagcgatcacaaagattggaggttatatcatgctcttctccatcctgatctcactattgtcctctgccccactgcagaaaattccgcttctgcacatagcacttccgtttctagaaatcacaaacgggattccactgttatgcgccgctgacacttcctgcgctgtacgcttcgttctgacactttctctcacggcatttggcggtgtctgctcgattgcacagacaaactgtatgctagaaggaaccggactttccatatttccttatttccttcaaaaactgatcacctcaattctctgtgggatgttgtcagctctttttttccaactcttcgtctagccttagttctgagttgcatttccgtcatactctgcttcttccggctgaacaagctccgcacgatttgcacgtacaacgtcatagcattctttcagtgaatttacaagtccatcaaatttagatgtataactgtccattgtgtgtccgacaatactttcaacacctgctaaaagttcgtctgtatattgtacagcacctaaccggatatcatttgcatcatttgtagcattatcaagaatctgctgcgcctgctctgtcgctgccatcaccacttcatttgcctgcgcataagcctgctgcataatctcatgctcacttaccagctcgtttgtctgtacatgcgcttcctccagcatactgtctgcttttgcctgcgcatctgcaagaatcgcatccttattagaaataatcttctgataacgcttgatctcatccggtgtcttcatacgaagttcccgaagtaattcatcaatgtgatccttatttacgataatctttgatgtagataatggcttaaacggacatccgtcaatatactcctcaatctcttcaataatctgctcaatacggctgctcatagttacactctccttttggttttcatcttttcttctatcttatctacgaccagttctggtacaaactgtgtgatgtcgcctccaaatgctgccacttcttttacagttgtcgagctaagaaacgaatactccagacttgtggtcagaaacatcgtctctatctctggttctaacttgtgattggtctgtgacatttgcaactcatattcaaaatctgtaatcgcgcgcagtcctcttacaattacctttgcaccgatctgctttgcaaactctaccaacaatccgtcaaaggccatcaccttgacatttggcagatcttttgtcacttcttctagtattctaacacgttcttccacagaaaacaacggcgtttttgctttattattcagcacaccgacaattaattcatctgcgatctgaccggagcgccggatcatatccagatgtccaaatgtaaccggatcaaaactgcccggataaattgctcttaacatactctttcgcttccttccagcgcgaggaacaaatgcagattggtcttatattctttctttttcaacaccgaaaatccaaaagattctacataagaaaagtccgtcgacttagatgcctctacgatgatcacactgtcctcatcaatcaacttcgattctgcaagatactccaacacctgcttttccaacagtttattatatggcggatccataaaaatatagtcaaatgttccgcttccttccatgcgtctgagcgcagtcataacatctgtcgccatcgtcaccgcgcgttcttccaattttgttttcttcagattctctttgatacacgccatcgctttcggattccgctccacaaatacagcttccccggctcctcggctaagtgcctcaatcccgattcctccgcttccggcaaacagatccagaaatctgcaatcatataagtaaggagaaatcatattaaacagcgtttccttaatacggtccgttgtcggtcttgtatccagaccatccaatgtctttaattgtaatcttttcgcacttcctgcaattactctcataagttctcctttctctctttctcatttttaccggcaagcatctgactgcattttcagaaaaacataccggttctcgtctattatataaatttgttgtaatattgtcaaatataaaaagaatgtgccttggcacattctttatactttatggaactcctctacattgatcacaaagatggtggctcctccggcttctactgtgattggcacaaaagaataattgctcacaggagcaccgcttcccatatatggagcctgcacttcgatctgctgtctctttgcgcattcttctttcacaatctcaattacttccggaactttctcatcctctgtaccgatcatcaatgttgtatttcctctctttaaaaatccaccggtactggaaagctttgtgacactgaactttttctcattcaatttccttgtcgctctttcactatcttcatcatgtacgatcgcatatactaacttcatttcaaagcccccttcacatgctcttgcttttccgttattttaccatttttttataaaatatgcaatcaaagaatgagaaaaagcgcataggattttcccatacgcttttctcattcttctacctattgatcaacattccgacttatttaccagccatctgtttctcctgctgttcaatcattttctttaccatatatccaccaacagatccgttctgtctggatgtgaggtctccgttatatccttctgttaaaggtactccaagctcgtttgctacctcgtatttgaatttgtctaatgcttcttttgcttctggtactgctgttctgtttgatgaacgacttgccatgattttttcctcctttaaataactatctttttgtttttgtaacaattgttttttgttacatggatagtatatggagtttttctgttcttacactggaaattttttctttttcgcaatacgacaattttacgtttcttctaagtttgtattttatccttttacagtgtattctcgatcgcacttttctgcacagaatgctggatatgttcttttagatttctgcacgcctcttcttcaagcccttttccatttttcaaaatccagtctgccgcctcatttgctctctggagaatcttcgcatcttgaaagacgtctccaagccgaaaatccatcagaccactctgcctgatcccgaagagatctcccggaccgcggagctttaaatcttcattcgcaatataaaatccatcgttagaacgattcaaaatttccagacgttcttttgtctctttccctttcgaaccactcataaagatgcagtaggactgatagttccctctgccgacacgtccgcgcagctggtgaagctgtgcaagtccaaaccgttctgcgttttcgatcatcatgaccgtagcattaggaacattgatcccgacctcgatcacagttgttgacacaagcacctgcgattcattctttccaaaccgctccataatctcatccttttgcgactgtttcattttcccgtgcagaaaatctacaataatgtcctcccccaattctccctgtagcttttccgcataatcgataacattttccgcctccagatgttcactctcttccaccatcggacagattacataacactgccttccctccgctacctggcgtctgataaactggtatgccgtctttcgataactggtatcaacgacacagtttttaatcgggagcctgttcgccggaagttcatcgatcaccgacacatccagatccccgtacaaaatgatcgccaatgtacgcggaatcggtgtcgcgctcataacaagaatatgaggcagttctccttttcccgcaaactgttctctctgttttaccccaaatcgatgctgttcgtcagtcacaacaagtgccagattcgcataagttactttctcctgaatcagcgcatgtgttccgacaatgatctgtgcctgccccgattcgatgcgcccgtatgcaagccgtttttcttttgctgtcatcgaacctgtcagcaattctacttttaacggaatctcatattgttcaaacatctctgtgatagaatcaaaatgctgtcttgcaagcacctctgtcggagccatcatcgctccctgccagccacagaacgccacactcatcaaacttaagactgctatgatcgtcttacctgatccgacatccccctgaatcagacgcgccatcgtatgtgtgcctgccatatctttttgaagctgttcccatacttttttctgggcattcgtcaattcataaggaagcttttccaaaaacacttctatctcttctgacggatgaaccggaaactgatttcgacttcgctctttcttttctttcatttgccgcagcgaaagaataaatacaaggaactcctcaaagaccaatctctctctcgcctgataaaattcctgcttttcttttggaaaatgtattcctctcactgaaaagttatactctgccagatggtatttcatacgcacggttcccggaaggatctctttttgcagttctagataatcaagagcctgtcgcaccgctttcatcaccgcattatttgtcagtcctgccgtcagggggtaaattggctgaagcgtatctaattttttttcatagctatccgccggagaaaaaatctccggatgttccataactctaactcccttttttgtcacaacccttccgcgcagaatcacaatctgaccattttgcagtgtatttctcagaaaaggcatccggtaccagacaatctttattgttcccgtcatatcttttagatatccgcttgtcacctgagccccccggctgctcacctgaagcgtcccataaatcatgcctctgaccgcctgcactttctgttcctgaatctccccgatactaacaggtggatcatagacatcatacccacgcggaaaataccgaatcagatctcccacggtaaaaacccctagtttctgaaacagcttttctgtcttctctccaattccttttaattctccgactcccgactgctcattcatgaatttcttttttctccttttttagtagatttttcaccgaccattttcttaaaatacctcgatagaaaaaagccgtaagacaaatcgattgttgcactatcccaccatttctgattttcccttgtgcagcccgatcttatctcacggcagctttcccatatatgattttctaatggcagaattgctctgcttctctcctactcaacagatactacataatagtaaatcggctgacctccaaaatgtgtatctacatccacgtccggataaatctcttccagttcttctgtgaatctgtccgcctcttcctcggatacctcttccccatagtacaggctgattaattctgagtcttctgtcacaagatgtgcgagcatctcctttgttgtctcctccacggaaattccgacagcaagaattccactgtcaccgattcccatgatatctccttgatgaatttccttgtcatcaatctttgtatctctgaccgcataggttacctggcctgattttacattttttatttcttccaacatagtttcttcattccagtcagcatcattttccggggaaaaattgataattgctgtaatgccctgaggcacggtctttgtcggaattacaataatatctttatcttctgtcagctcttttgcctgattagcggcaagaatgatattcttattattcggaagaataaagatatgttttgcatgaaccgcatcgatagctgtgagcatgtcctctgtacttgggttcattgtctgaccgccttcaataatgtagtctgctccaagttcacggaaaatttcgttcattccttctccgatagaaactgcgataaatcccatatctttcataggaacttctttcttctcagcagcctgctgtgctgcgagtttctctgcatcacgaatcagcttctcttgatgttcctcacgcatattgtcaatcttcatacgagacaattgtccataagtgagtgctttctgaattgcaagacccggatcatttgtgtgcacatggattttcacaatctcatcatctgcaacacatacaatagaatctccgatcgattccagataagctttaaattccatctcatctgcctctgtaaaatgcttttctgtcatgatgataaattctgtgcaataaccaaacttaatatgtgcagctgtatcctggctgactcttgtcaccgtagcaccgcttcctgcggaaatcgcgctataatctacctctttgccaagaaatgcatcataagcaccctttaaaacttctaaaagtccttgtccgccggaatccacaacacccgcttcttttaagaccgggagcatatccggtgtctgagaaagtacatattcggcatgggcgatcacttgcgggataaactcttccaagtcatctgtctctccgaccagttccatcgctttctctgcaatccctcttgcaacagtaagaatcgtaccttcctttggtttcatgacagccttgtaagcggtctccttcgctttttcacatgcattggcaagtacaactacatctacttcatcatactccttgatcccctttgtgaaaccacggaacagctgagagagaataacaccggaatttcctcttgcacctctgagggaaccagatgaaattgcctttgcaagtgtctccatctccactttctccaacgcagatacttctttggctgctgacatgatagtcagagacatattggtacccgtatctccatctggaaccggaaatacattcagttcgttgataaattctttctttgcttctatgttcgcagctcctgccagaaacatctttctgagcatctctgcattcattgtcttcattgccacaatgagttcctccttaactaatcaataactcttacgccttctacgaagatattgatcttctctaccggcataccagaaaattcttctactttatatttgacgttactgatcagattatcagataccgccgaaatactaaccccatatacaacgatcacatgaaagtttaaagtaatcttgttctcatctgagatggatacctgaatcccgtgtgtcaggctttctttctttagtaattttacaagtccgtccttcatgctgactgctgccattccgacaatcccgaagcactccacagcaaccgaacctgcatattttgcaattacctccgaatcaatagtaatgattccaagttctgtactcatacaacctttcatatctattccctccaattcttctggattttttcgtttcgcatgcatttaacatatgtattatactctgttttgcttcactttacaagaattcctactaaagtttttcctttttgaattttatgcttgcaaaatccaacactttctgatagaataaacagtgttatgagtctaaagaagactattaagatcgttaggaggtgcaattatggctaaatgtgctatttgtgaaaagggtgctcacttcggaaataacgtaagtcactctaatagaaaaacaccaaaaatgtggaaatcaaatgtaaaatcagtaagagttaaaacagaaggcggttctaaaaaaatgtatgtttgtacttcttgcttaaaatctggcaaagttgaacgtgcttaatcagccttaaaaaagagcctgtatcttatcgttttgataaatgataagatacaggctctttttccgttcgaaagccaatttcacgaaaagaaaaaaacagagagaacttctccctgttttcctatcagcagctaaacagcaaatatcctgccagaatacagatcagtatcagcatcactgtccagaaagtattttcaaggaacattgtaatcaacatcccgatcgccacaaaaaacagcgcaaatcctgcaacacgtttcatctatgtcccccgtttcaaacactttctttacttccagtttatgcaggctttctgttcttatgcctgtccgttcttatctgcttccgcttcactcagcatttcatttacttctttttctgtcactgtcttctcgcccttggagctaaagcggtcaataacctctggaaccatatcaaaaatttttgtgatagtatcctgatttttaatgttcacaagtcttgttgtaccattctgaataacaagaactgcactcggtgacatctttccaccaagacctcctcccgctctgtctttctgttcacctgcaaaagctcctgctccaacaccaaaggaaacctccaccagaggcaagatgatcgtgtctccaatatgaatcgcctcacctaccactgtcttcgaagaaaggacactgtccattccatgaaaaagagcttctactgttccattaaatttgttctctgccatcacattttcctcctaccattttaattttttgatatctatgatgatttttcttacatctcggtctttgatcaatctccacagaatggctagcatccggaaattatggattttgccctctatatggacagaaccctctaatactttattctcaaaatccggtacaataactgtattctctcccaaaaacgggaacagcataccaagcactgccagcgcctgtccggtcatatacggatcttccagaccaatttttcctacaatcttaacatctttcggagagacatgtccaagaaaccttcgcacttcccgcttcagactgcaaaatgccctgcgatgagaagcatctgtgagaaagctttcgatttgctccttttttcctcgaagatttcttcctattgcaagaatctttctccaaaaacttttgcagctttctatccactcagaaattttctctttcatacggtcccaaagaggctttttctttctgccgcctgcttttcgccgatcagctgtgaaactttccttttcttcctcttctttgtctatcccagattccgttttctcctgacggcactctcttttctccgcctgctcttgcacgttattttcaggcagagaacaatttgttttctccgacggcagactctctttctgctcctttaaaaatttctgttcctctttttctttctgaagatcattttcttctggaacttcgattttttcttccgactttccttctttttcttccgagaacagatatttccaaccgattctgattttcatatccgctttcccttttttccagcaggcagtcaaaaaaaataatttccacatccaagaaagttcaaactctgtttccagtgtctctatatcattttgacaggatgcatctgcacggtaccgaatgggaacaaatagtcccaaattaatgagtaacaatactaagagcaagaaaaccgccagtacaatccctatccattttaaaatcagcaacaaaatatgcagcataactttacctgtcagatcctttcctgaatatattttttcatctcaagtgtctttgtggcctcatgcacttcctctgcgatttttctcacaagctcatatgcttcccattcacttgccgcaattccaacgatccatggctccttctcaaaatagagcggttgaagaagcattgctgcatgataaatttccagctgttccccttctttttgggaaagcacaatcacatatgcttgaagttgtggccttctatactttattttccgtaaaattgatttttcttttcctttgatagattccccgacatagagattcctataaacattcatctgtccgccttctttatctcttttcatcttttttccaaaatgcactgcccttattcataataatacgcattcataatagcttttgcaaccggaatcgcccttccaccggtttgcatctcatttccttctacgatcacactgacaacaagttccggatcctccacatttgtaaacccgacaaaccaggaatgactctgaccgtcggaaccatattctgcagtccctgtcttcccggcaacactgtaactttctccagaaagctccattccggttccctgtgtcacaaccgatgtcatatactgtgtcagaatggatgcctcttccgccgtcatcaattccttataaacggaaggtttgttctttttcaccggtgttccggtataattcgtcacttcactcacaagataaggcttcatcagttttccgccatttgccaccgccgatgtgatcagtgccatatgatatggactaacctgtgtatctccctgtcccatggcagtcatcatcacttccgcgcttgtcgatgtttcctctaaagaaaaatcactcttccggtaatccaacaccgatggcaacttagaattaaagagcagctgtttacatgtctttgcataggattttctgtcaagactcaatccaatatttgcaaatgaggagttacatgaattggcaaaagaagtattcagatcctgaaatccatgtgcgatatgattaaaacacgggatcgtagtgccatcataagtaatttccccatagcaatcatatgtatatgcaccataggccggctgctcccggatatattccagcgctgttactatcttgaagattgaacccggagcataagctccctgcatggcacggtttaaaagaggactctgctcattgtccgcgtttaaatattcccagttgtcttcaacactgttcggatcaaaggacggcttggaaaccatcgccaatattttcccggtatccgcctccatgacaacaaccgcacctttttcatctcccaatgcattgtatgctgttgtctgcagttttgcatccagtgttgttacaacactgtctccggtattttttttcgcctgaaattctttgataatccgctctacaaaaaaagcattggaagtcagaagatcaaaattttctgcagattccagtccgctctttccgttgacatcataaccgactacatgggcaaatacttcgccatacggataggtacgcatctcacttccatcttctgccacttccgtctttgccagtacctctccatttcggtcaaggatcgaacctctcacaacacggtcagaaaatgtatcctgtcttgtattatacggactattaataattttttcactcttcaccacattaaaatatacaatatatcccatcagaacaagaaacaatgtgacaaacaagtaggtcactctagcgaattctttgtttgtagctttcttctttttttgtctttctttttctcgtttccttttggaacgcttcccgtcttctctcatctcgtaattgtcttgctttctttctctcaatgatctcttcctcatcttctcttaaaatatacagtccctgaataatcgcaaacatgatcagtgtacttaagatagaacttcctccgtaactgacaagcggaagtgtcaccccggtagatgggataaattttgtcacaccgccgatcgttagaaatacctgaaagatatagcaggtaccaagtcctaacgctacaagcttatagaatcggtttctcagctgcatggcaatattcaaaaacataatatagcaacttacacaaacaaggatcaagcatagtccgaaaatcaaccccagttcctccacaatcgcagaaaaaataaaatcttctgctgctaccggtatactctccggagatccctgacaaagtcccatacctaaccaccctccggtcccgattgcaaacagcgactgcgccacctgaaaacctccggtctcataagttgcaaacggatctttccagacagatacacgaaccttgatgtgtcggaacaaatgataagcgatcactgccgcgccacttcctgccagcattcctccggccagataaagcggctgctttgtcgccacataaagcatgatcaggtacacaacaaacaaaatcagagcagctcccagatctgtcgatgccacaagaatcagcacgtgtgccgcggcaattgccgtcgtgatcactacatttttaaagtctgtcgatttccgaagactcgccgccacaaaaaatacaaacgaaatctttacaaactccgacggctggatactgatccctgcaacagaaaacccaagttttgccccgccggatgtcaccgcaaataccgcaacaagtgcaagtgccgcaagacctacgcctgcataaatataagtccattccgccaacgacttcatctttcgtatgacaaccggaacgatcagacttattatcatcgagattccaacaaaaataaactgtttgattgccttctctgtattcaagcgcaaaatcataataaaaccgattgataaaagcatacacatgttgttgattacgactcttgatacgttcggataaagaatcgtatacagcgcgatcaccgcaagaaataaaatcacctgcgccaaatagaaaaatataatctctgtctttccggtcttcagatacatgaccccatatgcgatcaactgaatggaaaacatcagcttattctgtcttaatagaatctgctgcctgtcctcctcgtattcataacgaaatacagaaaaacaagaatacgtatatactgtcatcagaacaatcaacagatattttgaaaattcaactataatatttaccaatgtttcacctactttataccccttttaaaatgtcctcttgtaaattcaaacggaagttctccaatttctgctttgttcagaaatactttctgataaagtgcaagcatctgccttgtcctttgctcatcttccaaagtaaatgcaagtctaagtgctgccggggccagcctttcaatctccctcttttggtcgatcaatacaactggcgcagtgttataaatgatattgtaacactcttcacaacagttttttacctggaatgacttctgacagcggtctttcatagtaagaaatcccgtctgatgtgcacagcccgccgttgtcttctgcacgcactgggcagataccatcatcggcagatatccataaatcaacagctccatcccttcgcatcccaactccgagagttcatggcaattcaattccaacggtgccgaaagttctgacacatattttttccaaaattccttcgcatagtgattaaactgatagatatggtgatctgccacaattgtcttctcataagaatgctctcgtaaaaactgaacggattccatatttcgaacaagcacaccgtcaaactgctcctcaagctgcctataatttttctcatagcgctttcttgtcctatctctgaaaatatgaggcattgcaagaaatactgttttccctttttcgtgcaaaaagctaatagcctcattcatcttggcagattgtaagattcccggaaacatattacagtcaatatataccctggaaatccatgaagcctcggcaatcggctccaactggcatccctgttccgcatatgcatacatctctgctgttgctgcttctggttgcaaatgcagacttcttccagtatccagtatctttgcttctcttccccttttttctttctccacttcttctgaaccgcttcttctatactgtgacacaatctttgcttccaaagcctccagcccttttcttcgcagctcatttaactgctgcattggaagaaagacatcttctttcacacaaacctgaatctcttcaaattgaaatggcgtatttcctgtctttttcatctgcttttcaatccgcgcaacatccaacggagaattctgcggggtttctgccacagctccttcgacttccacagcaatctgtttccactgtaattgtagtatagcagattttcccggagaaagaattaaattccccttaattttttcctgcactttttctctaaaaatgtcgttttttatctgtgagagcaatttttcattccgcgtacgatacaatgacatcccgtcactgattctctgatgcttatgtgtcacaaaggaaattttctgtccttctgccaccgcctgtccaactgtatacgtctcttttttgtctggcatctccagaacatctcctttttccaatggacgaagtgctttggcagtcacttgttttccttgctgttttaacactttcacagcttccacacccgcatgattcggtctggacagcgagatcatttctcttccatttctcgtgtgataatatcccccgtgaaaccctccgcggttataaatatccatcagcatctctttatccttgcgagatacagcaaaccctttctttccctgtgtcagataaagatccgcatatttgcggtacatcgcagtaacagccgccacatattctggttttttcattcttccttcaattttaaaagaataaattcccgcctcacacaactccggaatgtaatcaagcgtacagatatctttaaggctcagaacataagactctttcccacttttgccaaccttataaggcagacggcaaggctgggcacactgccccctgttcccgctccttcctccgatcatgctgctgtacagacactgccctgaatagcaatagcagagcgctccatgtacgaaactttccacttccagatttgtctgttccgtaatcgccctcacttcctcaagctggagttccctggaagtgacaacccgctccaccccctgctcctcgaggaattttgctccaagcacatttgtcacagtcatctgcgtgcttgcatgaacaggcaattccggaaaatgctgccgcagaaatgacagcacacccaaatcctgtacgatcactgcatccagcccctgcctgtaatacggctcaatatactgatacagttcattttcaatttctttttcttttaaaagcgtattcacagtcatataaatctttcggtcgtgcaggtggacaaaatcaatcgcctccaacatctgctcctctgaaaaattatttgcgaatgcccgcgcaccaaatttatttcctccgacatagaccgcgtctgcccctgctaaaacagctgcctccaaactttcataggatcctgccggtgccaatatttctattcttttcatttttctatcctttaaaaaaggctgtcagatgacagcctatttgtttcttgtgttcatttcagtttccagtttaacgatcttcatctgcaaggctctattctcttccttcagatcttccatcactttctgtagattctcaagcttgatctgctccgtgatcagctcatgcttcagatcgtacatctctttgttcttcttttcaatatcttcttcaaatgtattgcccagctgcttcgccttaaagtaatcgtccgcaatgttcaacgacagaaggatacttctaagttctgcgctttgtctgcgatagttctcgctactggtacattctgcaattttatgattcaaataagtggatactttctgaagatattcttcactctcaaatccgccgagtgtgaaaacttttccacctatcaaaacttctgtataattctttcccgaagccatggaaaacctccttatgctttacaatcttcttctccattataaaccatatttccagaaaaacaactatttttactgatttttataggaaattcccaaatgtgcatatgccttgtccgtgacaatccttcctcgtggtgttctctggatgaatccattttttaaaaggtatggctcgcagacatcctcgatagtacccgaatcctcaccgatcgatgccgcaagtgtttccagtccaaccggtcctccctgaaacttctcgatcattgcaagcaaaagattccgatccacatgatcaagcccataacgatccacatccagaagatccagcgcataatttgccacttcttccgtaatccgtccatcgtacttgacctgcgcgaaatctctcacccgctttaacagacgattcgccagacgcggggtgcccctggaacgctttgcaagctctaatgcaccttttgcatcaatctccacgccaagtacatccgctgagcgcatgatgatcgtccgcagctcttcttctgtgtaaaattccaatctttgtacaactccaaaacgatcccgcagcggcgccgtaagcatccctgcccgcgttgtcgctccaaccaatgtaaaatgaggaagatctaggcggatggaacgtgcccccgctccttttccgatcataatgtcgatcacataatcttccatcgccgggtagagtacctcctctacctgtctgttcagacgatggatctcatccacaaacaagacatctccttcttggagattatttaaaattgctgccatctccccgggtttttcaatcgccggaccagacgtgatctttacattgacttccatctcatttgcaatgattccggcaagagtcgtcttcccaagtcccggaggaccatagaacaacacatgatccagagattctcctcttgcctttgcagcctcaatataaatcttcagcgtctctttcgccttctcctgcccaatataatcttttaggagagtcggtcttaaatgactttcaatctttacatcttcttccagattctctgttgtaataattctctttgccatatctgtccttgtcctttaaaataccataaattttaacgattgtttcaatagttcttctacagtcatcgtctctgtcatcggaactttcttgaccgccttcaggctttctgcactgccatagccaagtgccacaagcgcctgcaccgcttccgactgcatatccgctcctcctgatgggactgacatcacttcctcttcttttgtcaatacatcatcaatgttcagcttgtcttttagttcgatgatcagcttctcagccgtcttctttccgattcccggagccgctgagattgctttaacatcccccgccagcaccgcaaatcgcaagtcatccggtgtcatcttcgataaaatattcaagcctcctttcggcccaattccattcactccgatcaaaagccgaaaaacttttaaatcatcttttgtcagaaacccaaacaactgcatggcatcctcacgcacgttcagataagtatggatcttcacttcactccctatcggaggcaacatcgtcattgcctgccccggcatgaagatcccatatccaatcccctgcacttctactacgacctgttcttcaccgaccgcagccagttctcctttaatatatgaaatcatctcgtctgtcctttctgtaaatatcgctgtaatctctgtacgagtagcccgatcactgctccggtgagtattccggctgtcaacaacaccggcatataataggaaatactcaaactttccaccaccagcattgcaacaagaagctgtccgatattatgaaacactccaccggcaatactgacacctatcacactgaagcttcctctcttcttcaaaagatgcataattaaaatactaaaacaacttccggcaatactataaaaaatagcaaacagattcccaaacagaaagcctgtcaaaatatttcgaagaatcgccaacacaaaggcctccttcgtcccggcatagtaaagcgctgtcactgtgacaatatttgccagtccaagcttgatgcccgggattccgaaagaaatcggaatcaaagtttccacataactaaaaatcaatgacaacgccagaaacatcccaaaataagctgattgtctgccccagtccttccgatgcttctgatttctatcctgcaactgcatcattttccttacttccttcatccgctctgtctacaatctccaaaatcaccttgttcggaagacagataatactctcacgattctttgaaatcttcggatgtgtagcacaaatctgatccggacaatctgcccagatcatctccacttgcccatcctgaatttttacccggttatgttctccaattgcaatctccgcatcttcctccagactgacttcccgaaaaacttctccgtctacttttattctcaaatatttttctgcatcctttcctcttctttccgtgaaacaattccccaccagaaagaaaagtgcagcgatcaaaacagttcctgccaggatccagtcattctttttcatcctatcacgattcctctctgatcttttctgtccattcatttcggtactactcattctatcacaaccaatgatcggatgcaaccacatgttcgatttcatgtgaattgtatcagcctgcaatatcgtattctcatgcgaaacgtgttttctactgcacaggattccatagatgttccctatataaaaaatctcccagacatagatttcaaaaattcgtctatgtctgagagatctgacgctaattaataataaagtgcatttgacattgcaattccgaacacaacaaagaataatgtataaagtacaatgacaactgccatcacgatcaacatcgcgcggctataatttttccggttgatatttgtattggcaccaaatgcccaaataaaatagagaacaattcctacgcaaggaactaatcctgccagaatagtaagcaaccactcacccatagataatggtgcatctaatggtttctttccggaattcccactataattctgattataattctgctggtatccttgattatagttcatattataattctgattatagttctgctgatatgctccattgttctcgccagaaccattctgagaaccatcactataatatccatagttcatcgtctgctgataagaattgtctgctgcctctgcattctgatcctgctctggcatattactgaatttttcatccatactaaaatcctcctcgttctctctttcaaatcattttgaacatacgctatatccttctaatctgaaattcaagtacatttctattttttgattctagcatatttttatgttttgcacaattatttttttgcatttttctatcttctatatattctgtccaatattttgtacaaaagattctctcgataatatcccatcggagcttctcccggaaattgtgtcagcatccggtaaatataaattacaatacatgcaataaggagaactgcaccccatgctgtcacatgcggcagttttcttccaagaatatagcgataaaagaaaaacgcacacagaaaaagaatcatcggatagatcatcggattcatccgatatgcctcaacaaactttgcgcaaaacaagagtctggcagctcgtgtcagaccacaggcaggacacggaaatcccgtcagacagacactcggacagcccgcattgcagcctacatgcataaaaagaaaatatactgctactgcaaacaatgctgtccggtactggaacaaatccttccagatccgtgcagctatctttttcacaatctcttttacagaatgatctttttcggacatttttcagcacatgctccacagttcgtacacttctctggatcgatccacgcaagattattctccacaacgattgcatctgccgggcagactttctgacacatccgacagccaatacatcccgtgctgcatacagccatcacatcttttcccttttccttagaactgcactgtacaagatgctttgcctcatacggtacaagctcgatcagatttttcggacatgctttgatacattttccacatgctttgcatgcttctttatctactaccgcaactccgtctacaatgtgaatcgcatcaaacggacaggcttttacacaagtgccaaatccacaacatccgtaatcacaggattttggaccaccattctgcatatgcgccatcatcacgcagtcctcgattcccgtgtacgcataatcctgctttgctttcccacaagtccccgcacatttgacaaacgcagtcatccgcttctgttctcctgctgcgactcccataatctctccgattttttccgccaccggagcgccgccgactggacaggcagagatttccgcctctccttttacaatcgcggcagcaagtccggagcaccctgcgtatccacagccgccgcaattattgcccggaagcgcatcacatacttttgtttcacgctcatcaacttccactgcaaatttctgtcccgcaactccgaggaatacaccaatgaacaggccgactcctcccacgatcagggcagcaaatataattcctgtaatactcatcgtctttcctcctgcctataagttcagtccggaaaatccaaagaatgcaatcgccatcaagcctgctgtcacaagcacaatcggcattccccgaaaggattccggcacatcattatgttctgtcttctcccgaattcctgccatgatgacaatggcgatcgtaaatcctaccgccgttgcaaatccattcacaacactggctaaaattccataatccttctgcacgtttttcaaagcaactccaagtaccgcacagtttgtcgtaatcaatggcaagtacaccccaagcgcgttgtaaagcggaggcatcattttctttaacaacatctccacaaactgcacaagtgcagcgatgacaagaataaacacaatcgtctgaagatagacaagtcttccatttaaaattgcatcgtttgcaagaataaatttgtaaatcaggcttgtgataaaggaagagatcgtcaacacgaaaataactgctcctcccattcctgctgccgtctccacctttttagatacgccgaggaacggacaaagacctaaaaactggctgagaacaacattatttacaagcgctgcaccgactgcaatcaataatagttcttccatttactttccctcctgcttctctaccgaaaacactgcttttccacaacttccgtttccacaggatgcacagctgccatcacagccgctagccgcctcctgctgtccgcctttcgcctttgccgctttcactttgttctgaaccgccacaagacaggcaagcacaaaaaatgcccctggagcaagcacaaagatcgtgattggttcatacgaggccggcatgatcttccagccaaaaatcttcccgcttccgataatctcacggaccattccgattgctgtcagacctactgtaaagccaagtcccatcccaagtccatcaaagatagacggaagcaccggatttttggaagcatagctctcagcacgtccaagaataatacagtttacaacaatcagcggaatataaagtccaagcgaatcgtaaagacttggaataaacccttccaacaaaaactgcaccattgtgacaaacgatgccacgatcacaataaaagacggtacacgcgcactgtccgggataatctttcgcagcatggagatcaacatgtttgacattacaaggacaaccgttgttgtcagtcccatcccgagtccgttgattgcagaagtcgtcaccgcaagtgtcggacacattccaagcatcagcacaaatgtcgggttctccttgatcagtccgttaaaaagtcgttccgtacacttattcattgacacttcctccttccattgctccatgataataggcaactgcggcattgaccgcattggtaaccgcatcggttgtgatcgttgctccgcttaacgcatcgatcttaccctctttgccaccatctccttttacaacctcaaaatgatctgtattgacatcttgaaactgttccttaaattccggttcctgtgcattcattccaagaccggcagtttcactgattgataacagttcgattcctgtcacagtgccatccagtgtaatcccgacagacactttgatctctccaccatatccttctttggatgtagctgttaccacactgccgattgcattttccccgctgtcaagggccaatgccgcttcattgacatagcagccactaacccctgcatttcttaaaatttcttctgcctctttttcctcaaatgcttcaaatgtctgaaaggtttctgcctcttgaaacacagtataatatgcctcctgctttcgattttctctgctggcagcaatcggctcttttgtaatctcatagacaaatccgagaagcagaccggatatcaatgtgatcgcagtcaggatcaatgtattttttatgatcttctgattcattatctctctcctcccttcccgaatggacgtgggcgggttactctttcaatcaatgggacaagcagattgctgataatgattgcataagaaactccctctgcagatcttccaagcagacggaataaccccgtcagcactcccagacagacaccatacaaaatctgcccgttctttgtgatcggtgccgtcacataatctgtcgccatgaaccatgcaccaagcatcaaaccacctccacacaactgtgcagtaaggtagttcaagtcgaatccttttccactaaacaatacgatcatcacaataaaagtgatcagatatgtccccggaatccgaagatcgatcactcccataaacagaaggaacatcgcaccgatcataattgcgatcacagatgtttcaccgatcgttcccgcaatatttccaatcagcatgtccatggtattgacactctcacctgtttttagctgggcaagcggcgtggcgcctgacaccccgtcatagacaaatgttgtcattctccctgtaaaggaaatcaaaagaaagcacctcgcagcaagtgccggattcataaaattctgtccaagtccgccaaacagctgcttgactactaaaatcgcaaacaccgccccaagcacgcacatccaccacggcgctgtcggcggaaggtttaatgcaagaagcagacctgtgaccgctgcacttccatcagcaatcgtgatcttcttccccatgaaccgctcaaaaagatactctgttgccactgcagaagcaactgtcagaaacacgattccaagtgcctgtacgccaaaattataaattccaaaaagtgtcgtcggcattaacgcgatcaggacaaggaacataatatttcctgtcgtgacctttgcgcgtatatgcggcgaagatgatatattaaatgtctcgttcatatgtctctccctatttcttcttatttgccagagcaatcttcctcatagaaccaattgcctgcttcaagtgtctctttgccggacagacataactgcaggaaccacattccacacactccagcccctcccatttcaggaacgactcttcgtcatgccgttcagcaaaatctgccagtcgcgacggaacaatcctgcttggacaggcatccacacagcgtccgcagttgatacacgcacttggctcatgctttttcacttcatccttagaaaatccaaggattgcagaagaagtttttgtcacaggtacttctgtggaaaacattgcaaaccccatcatcggtccacctgagatcactttctccggcacgccttcaaatccaccggccatctcgataagttccatctggctcatgccgcaaggagcaagaaaattgccaggttctttgaccgcatctccgctgacagtgacaactctttcatagagtggctttccggaaataacggcctcataaatcgcaatcaatgtctccacattatccacaatacagcctgcatctgccggcaacatagaagaattgatcgcacgctttgtcgtcgcatagatcaattgtcgttctgctccctgcgggtattttgtctggagaactttcacttccatcctcggctcatctttcgtcagttcttttaacttttcaatgcagtccggcttattatcctcgattccaaagataccttttgcattctcaaacaactgcagaacaactttcatcccaccaactaacttctccggtgtctcaagcatccggcgataatctgctgtgatatatggctcacactctgcacagtttgcgataatatattctattttctccggttctttcggtgacaattttactctggtaggaaagcctgctcctcccatgccgacaattcctgcttccgcaatacaatttaagatttcttcttttttcatctgctcaagtggaatcacttctctccacttcgcctcttcatactgttcatcattttcaattatgatactgttcacttttgcacccgtagatgtaaaatgtggagcgatcgccttgaccgttcccgacacggaagaataaattggcgcagatacaaatccacctgcctcagcaattttttctccccggagtactcttgcccctatttctacgattggattcgccggtgctccgatatgctgtgaaagcggatagaccagttctttgcccggtttggcttccacgatcggtttgtctttcgacagcttcttgccatcgtccgggtgaatcccgcctttaaacgtcaacaatcccattttttctccttctttcttataatttatatatatcatacaaaaaatccaaagatttttctattgaatttcccatttttcttgtatatttttgcaaacagcttgtcgtttttttaacatctttgtgaaagtgaagacaaatgattaggcgggggaaaatgcaaaaaaccacattaggagaattctcctaatgtggcaatgattccatattactattcagcttttgattattcttctgtagtttctgctgcctctgtctctggctctaatgctttcatgctaagactgattttcttctcagcttcatttaagtcaacaactcttgcaacaatctcctgtccaacagataatacatcagaaggtttttctacatgagcttttgaaatctgagatacatgaagaagtgcatctacacctggtgcaagttcaacgaatgctccaaaatctgtcattcttgcaacttttcctgttacatctgctcctacagcatatttttcagaagcatttgcccatggattagattctgggaatttcaggctgagtgcaatctttgtatcgttgatatcttttacaagaactttcacctgatctcctacctggaatactttctttggattttctactcttccccaagacatctctgagatatgaagaagaccatctactcctccaagatcgataaacgcaccaaaatctgttacatttttcacagttccttctactgtatcgcctacttttaatttagcaaacagctctttctgaagctctgctttctctgctacgagaagctgtcttctatcaccgatcacacgatttcttcttggattgaattcgctgattacaaattcaatttcctgtccttcgtatttgctcaaatctttttcataagaatctgatacaaggcttgcaggaataaatactcttgcttcgtcaacaacaacacttaatcctccacctaaaatctgtgctactgttgcttttaacacttctttattctcgtaagcttctcttaatctctcgtttcctttttctgctgcaagtctcttataagtcaacagcacttgaccttctccgtcatttaccttcagcacttttacagtcatcggatcaccaacggaaacaactgttgttaaatcaacatttggttcgtttgtgtactcgctgcgtgtaatgattccgtctgctttacatccgatattcaggatgatctcgtccggtttcacatcgattacagtaccctcaacaacctctccatttcgtattgttttaaatgattcttccaacatttgttcaaaagttaattctgacatttttttgaacctcctcaattattttattgggcgtggatgcccctgctgtaatacctactgtttccacggaccttaattgattcatatccaaatcgtcaagtgtctgtatatagtacgtattgttacatgcttttttacatatttcaaataatttctgggtatttgaactatgcttatcgccgatcacgatcatagcatcaacaccctttgcaatgctttttgcttctgtctggcgctcttttgtcgcattacaaatcgtatttaaaacacttatatcatacctctttttggagataatttcaactaaatctttgaatttattgtaattaaatgtcgtctgtgatacaatacatatcttttgttcctccggcaaagacagttgctctgcttcctccgcatcttgaattacagtcaccggcaaaagtgaccaacccataattccctgcacttcgggatgttccggattcccaatgatgatcacatgacttccttcctcacttgccttctttacaatattatgtattttctttacaaacgggcaggttgcatctacatactgtagctttctctcctccagcagatcatagatcctctttggcaccccatgagaacggatgatcacgatcccctctgtcagcgctgccaactcttcttccgaatgaatcacttccactcctcgactcctgagatccttcaccacttcctcattgtgaatgatcggcccatatgtatagattttcttcccattttccttttccgtctgctcatacacctggtctactgcccgctttacaccaaagcagaaacctgcggtctttgcaacatttacctccatctgccgcctcactttccattgcttttccaattcctacttacacaccgataaaattgcctgcacgacttcttcgatcgtcatctcagaagagtcgatcagcactgcatcctccgcctgcttcaatggagcggtctcccttgtcatatcacgttcatcacgctcctgaatatctttctcaatctcttcaagagcgcatgcctgaccagcttcctgaagttctttgaatcttctttccgctctcgtcctgacacttgctgtaagatagatcttgacatctgcatgcgggagaatattcgttccgatatcacgtccatccatcacaacgtcataatctcttgccagttttcgctgaagttccagcaagtgcgccctcacctccggaagtgccgatccgacagatgcgaatctgcccactgcttcctctctgagtcttccagtaacgttctttccatttaaatatacctgctggctttcattctcatagcgaatcacaatttctgctccgccgcatattttcttcatatgttccaagtcttccggagtaagcccctgctcctgaaaataaaccgccatcgcccgatacattgctccagtatccacataaatgtatcctagttttctggccaccctcctggcgatcgtactttttccggcacctgccggtccatctatcgcaatattatatcccatatttcctcttttcccggcagtctcccgccaatttttctcttttattttccaacgtcactaattttgcaacatctatccctgctattttatactgcttcccgccgcatatgcagttgaccacgcaatctgcagattatatccgcctgtcaatgcatcaagatctaacacttctcctgcgaaataaactcccggcaccagtttagactccattgttcccggatcgacctcttttactttcacgccaccttttgtaatgatcgcctcattgtaaccacgcagtcctaagattgtcatctcaaaatgtttcatcagctttacaaaattctgccgctcttccctcgaaatatcatgtacctttttttccggatcgatcttactccgttcaatcatcaccggtatcagttttgccggaaacagccttgccactgcatttttaaactgtttgttaatattttgctcaaaatccctaagcacacgttggtcgagctgctcttccgtcaatgctggtttgagatcgatgacaagcttcagtttcttctctcctgctttctttgcaatatggctgctgccgcttaaaatcagcggaccgcttaccccatagtgggtaaacagcatttctccgaaatcctgatacaatttctttttcccatcataaattgccgcctctacatttttcagtgacaacccctgcagctcctttacaaattcttcctcaattgccagaggaactaaggatgggtagatatcagtcactgtatgccccagctcctctgcgaatcgatatccatctccgttagatcccgtcgtctgataagaaaatcctcctgtcgcaatcacgcaggcatctccctgaacgcacgcgccatctgcaaactctaacccggaaaatctgccattctctgttaaaatttttgacacctttgtataaagatgcactttgacaccagcgcgcttcatttcgccggaaagcgctccgattacatccgaggaatgatctgacaacggaaatacacgattgccgcgctcaattttggtaggaactccaagcgtttcaaaaaatgaaatgacatcctcatttgtataactataaaagctactatataaaaatttccggttgctcacaacgttttcaaacagattttccatatccccggcatttgtaatattacagcgtcctttcccggtaatgaataatttttttccgagtttttcatttttctcaaagacatgtacttcattcccatttcgcgccgcaaaaatagaagcaaacattccagccgctcctccgcctacaatcaacactttactcatcttatttttctcctattcccaaggttgtttcctcctcgatctcatcgtttccgtagacttgattctcatcccagatctcttccagaaatgccagtgtgcgccgcatttccttttgtttcttcatgcagagcgctacaacaagcgcattgatcacgctgagcggcgctacaagtgaatccgcaatcgatgccatatcacttctcgcaatcaaattacagtctgaatattctgtcatcggtgagcgttcactatccgtcagtgtgatcacttttgcctctcgctttttggaaaaagaaagcgccttccgggtcagttgtgaatatcttggaaaactgataccgatgatcgcatcttcctgtccgattcgaattagctgttcaaaaatctcactggaacaattcgtattgacaagaatcacattatcaaacagaaaattcaaataaaactgtaggaaattagcaagtggtgcacaacttcggattccgatgacataaatttttcgtgcctgaaggataatatccaccgcccggtcaaatgcgctttgatcaatattcgtcagtgtgactttaattttctcaatatccgactggagtacggtctctaaaatttctgactgactgattctcccataagtcacttccatacgctgaatcgaattcagcttatttctcacaagttcttccaacgctttctggaagcccggatatccactgtacccaagctgcgtggcaaagcgaacaactgtggactcactgacgccgacaacttcaccaagctttgccgcggtcaaaaaaacagccttgtcatagttctctataatgtaatcagccaaaagccgctgtcctttgctgaatttttcatactgtgtctccattctctttaagaactcattcccacttgttccacctgtatgtttcataatttccccaccatttcctctaagtcttcacttattatacacaactacttccttgaagtaaaggaaggattctaaatcagtccataatgcttcattgcccaagcaattccgccatcttccactgtctttgtcacaaattctgtatacggctcaagccccggcgcatgatttcccattgcgatcgtatgtgatgcatattcaaacatcgacaaatcgttcatactatctccaaatacatagacctgatctttattcagaccgaatttctttactaggaattcgcatgccgtcgccttcgaaaatgctttctgtgtcagctcatatgtattttctccccggtcgatcaccgcaaacgcatcttccatcagacgaaaaaaacgctccttttcactttgttcatctgcatacacaaaaattttgtcgtaaagaaatccaccttcttctatatgcttcttctttcccagacccaattgtccgaaatagtgtcttccctgctccaatttttcaaaccgcgagacttttttcggaaaataaagatcttccgttccttccaaaacaccatctagcccgcattcccgcatctgctcaatatatttttgtccacaggcttcctcaatatgactttccagtaatacttcctcatgaaagagaagatacgatccgcacccacacaagtatccatcaaattcaaattgataaagctctttcggaagcgcacagaccgttctccccgtattgataaagagtaaatgcccatttttcttcgcttctgcaagtgcctccaacgcactgtccggaattttccctgttttatcgcttaaaagtgttccatcaatgtcaaaaaataagattgattgcctcatcttgtatctcctttttcttttctgtcttcatttatcatagcgaagattccgcgtttgtcaacccccacatgcattccatacacacctgcggattcgcaaaataaaagcgaccctgtggaagctccattctctggctgctctcccacagggtcggtttatgatcgacagagacaggctgcttgctcccctgtcctttgtcggctctgtcttatttttctataccggataagatccgttctttgtgtcggcaactgtctgatctactttcgtctgctgcgcttctctatatttaaagaaatctgttgccacttgtgggaacaatgcataggaaagcacatcttcgtcctgttgtgaccactgttccatttcacttcgcagtgtatctaactcatccgggatcaagtctgccggacggcatgtgataacttctgcatctccgatacatttcttctgcacttcttcgttaaacggtttgactgttttcccgtactttccactcagaagatcttttgtctccttggttgccattttgtagcgttctcccatcaggacattgaatactgcctgtgttccgacaatctgagaagatggtgtaacaagcggcggctctcccagatctttacgaactctcggcacttcctcaagcacttcgtaatatcgatcttctgctccctgctcttttaactgagaagtcaagttcgacaacataccacctggcacctgatacagtaatgtcttaatatttacaccaaggttcttcggattcagaagtcctgattctaatgcttcatcgcggattgggcggaagtaatctgcaatctccgcaagcaggttctggtcaaatccagtatcgtacggtgttcctttaaatgtctctaccataacttctgttgcaggctgggaggttccaagcgcaaatggagagatcgctgtatcgatcacatcaacacctgcttccactgcttttaagtatgtcatggaagccacacccgaagtatagtgtgtatgtaactggatcggaatgctgacattttctttcaacgcaccaatcaactctgtcgcctcatatggaaggagaagacctgccatatctttcaagcagatagaatttgctcccatatcctcaatcctcttagcgatatcaatccaatattcgtgagtatatgcatctcccagcgtataggacaacgctacctgtgcatgtcccttctccttatttgctgccgtgactgctgtctgcagatttcgaagatcgtttaaacagtcaaaaatacgaatgatatcgattccattggcgattgatttctgaacaaaatattctactacatcatctccatacggacgatatcctaaaatattctgtccgcggaataacatctgcaattttgtatttttaaatccatcacggaatttccggagtctctcccatggatcttccttcaggaaacggagtgatgcgtcaaaggtagcgccaccccaacactctacggaatgatatcccaccttatccattttatcgatgatcggcagcatctgctctgtcgtcattctcgttgcgatcagcgactgatgtgcatcacgcagaatcgtctctgtaattttaattggtttttttgctatatctgccatgttacttcctcctaacatttcactttttcaacttacattacaccgaagattgccataaaggtacctgctgcaacagccgtaccgatgactccggcgacatttggtcccatcgcatgcatcaacaggaagtttgtaggatctgcctctgccccgactttctgtgatactctggctgccataggcactgcagatactccggcagaaccaatcagcggatttacttttcctccagtcaccttgcacatcagtttaccgaacaatacacctgcagctgttccaaacgcaaacgctaccagtccaagcacaacaatcttgatcgtatcccagtttaaaaatgcttctgcacttgtcgttgcaccgacagaagttccaagcaggatcacaacaatatacatcaatgcattcgatgccgtatctgtaagctgtcttacaactccacactctttgaataagttaccgagcatcagcatgccgactaacggcgctgttgttggaaggatcagcgatacgacgatcgtaatgatgatcgggaatagaattctctccagtttagataccggacgaagctgttccatcttgatttttctttcttcttccgttgtgagaagcttcatgatcggcggctggatgatcggaaccagtgacatataagaatatgccgctaccgcaatcggtcctaaaattgctgtctgctgcagttttcctgcaaggaagatcgatgtaggtccgtcagctcctccgataatagagatcgctgctgctgccttatcactgaatcccattgccatcgcccctaaataagcggcaaaaataccgaactgtgctgccgctccaaggaggaaactcttcggattcgcaatcaatggtccaaaatcggtcattgctccgacaccgaggaaaatcagtgacggtaagattgcccactcatcaagcaagtagaaatagtgaagaagtcctccgactccatttgaagaatcctcaatggataacataatatctgggtaaatatttaccaacagcataccaaacgcgatcggaaccaaaagaagcggctcaaatcctttggcaatcgccagatataaaaacacgcatgctaccgcaatcatgacgtaatttccaactgtaagattgaaaaaagccgtctggtgcatgaggttatccaatgtagtcataatgtattccatattttaacctccagtctgtgtccgggacatcattaattcaatgtagccagtactgctcctgattccactgcatcacctactgctacatcaatgctggctacggttcccgcctccggagctacaaccgggatttccattttcatcgcctcgatcacaacgatcggtgctcctttttctacctgctgtccgacagttgcctctaatttaaatacttttcctgccgcacctgctgtcactttgacatttcctgtccctgctgctttcttcggtgccggggctgcctttggtgccactggggctttcttctgtaccggtgccgctggtgctgctcctgctgctttctcctctactgtcacatcatatacatttccatttactgtaattgtataacttttcatcttcaaattcctcctgaattaattccatttatttgattttcttctgcggatcgatcttaccacaaatccgtcagacacactttcatctgccgctgcaatcgccgctgtaattacggccacaagttcttcatcatcggttaactcttcttccactacaggaacttccgcctttggcacttcttttaccggtgttttgtttttttctgtcttctttgtaaacttttcctgaagcattggtatatatttcaaaagtgagattacaaacgcaaggaagatcagaacaagaaatacagttcccattccaagaatggtattcattccggctttctttaaaatttctccggttgtataatctgccgcaatatcaagtgattctatattgagattctcgtcaaacttaaattccagcgttgcttcccgctcctcatacactgcctctgtagacacaactacaccagaatccgaaccttcaaactgatattcgccatgttctacatattctccacattctttttctgccgcttcccaggcatccatcatagaaataagcacttctggttcaattggcgcattcgcttcagacatgatcttattgatctgatattccgatgcctgccgataattatcaaatgcttcctcatccatcacttcaaaatttgcaatgataaactgtgtcacatatgtaagctgtgtttcatcatattccagttctttcttacttccacatccggtaaaactaagtgtcagagccaatgcaccgattaataagctgattctttttttcactttgcttcacctctctacactgttccatgtttttttgccgggcgatcttctctctttgtaaataacatttcaaatgcaccgaccagatattttcttgtatctttcggatcgatcaccgcatctacatatcctcttcctgccgcagccaaaggacttgtctgcatcgcttcatattctgccgccttctgtcggatcacttctgcactctcttctgcatacatgatcttggcagcaagattcgcatccatcattccaatctctgcctgtggccatgcatataccaaatctgctcccaacgccttgctgttcattgttatataggcacttccgtatgcttttccgatgatgacattcactttcggtacagtcgcatttgcaaacgcatatgtaagctttgccacagaagaggcaatatttctctccgaacacattgttgcatgatatccttctacattagtaagagacaataccggaatattgaatgcgtcacagaaatttacaaaatctgctgcttttctacatccacgtacacttaagccaccgtcaaattctgcttccacatttccatcttcatcatagaccttgcagcgatttgccactgcaccgatcgtcacaccgttgagacggataaatcctgttaccatttcttttgcatagtctctttttgtctcaaaaaatacatgattatctgaaagagtggagagcacgactgctgtatcttccgctgcattttcgatcgcatcacagagacgattcagatcatctgtacattcgtcataagagttatcgtcttcattatttgccggcaaaagacatacaagcgaacggatttcttctaagatttcctcttctgttccggttccatctaccagacccgcttcctcactctggaattttgcagaagatgtatcacactttgtaataacatttccttccagtgcatttggagaattcacaaataattttgcatgttctttctccataaacgtaaagtctgtcagagaagggatcactgcaagtcctcccccacatgttccgaaaattgctgtgatctgtggaattacacccgatgccagtgtctgtttcatatacagagttccaaatgcatggagcgcatccgttgcttcctgaagtcgaagtcccgcacaatctacaagaccgattaccggagctcccatcttcatcgcaagatcatagattgcggcgatcttctttgcatgcatctcaccgatcgccccctgcaatacagaggcattctggctgtatacatacacgaggttcccatcaatcaccccgtatccagtcacaacaccgtctcccggagtttcttttgtctgcatgttgaaatcagtcgttctcgctttaacagcagcaccgatttcaacaaaacttccctcgtcaagcaaagcggcaattctttcgcttgcgcggttctctgttgtttcgtaactcatatcttttagccctccaatttctaaaatttcataaagtttagccaaattttctgcctattatattatataatactgcttaaaaaatagcaattgctttttgatatttttttcacatattcaactgagacgtcctccctcaaaatatcctcttccatcatgctgattttttcacttcttctttctttgtttttgtatattttgtttgattccactcacgattatgatacaatagaaaaggcatgaaacggggacatctttttgttcccgcacattataaaatgtatctaaggaggaaatagaaatgagtgtaacagacagaattgcaaaactcagaaaactcatggaagagagaaagatggatgcctatattatcccatccgctgacaatcatcaaagcgaatatgtaggagaacattttaaagccagagcgtttatctccggatttaccggttctgccggaacagtgatcatcacaaaagatgatgcaggtctctggacagatggacgctatttcattcaggcagaaaaacaattagaaggaagtggaatcagacttttccgtatggcagaacctgatgtccctacaaaagaagaatatttggaatcggttcttccagatcacggagtgctcggatttgacggaaaagtcatcggcgcttccgaaggtcagaattatgaagaagtattaaaagaaaaagcagtctccatttcctatgacgaagatctgatttcctatatctgggaagatcgcccggctctttcaaatgctccggcatttttattggatcttgcatacgcaggagaaagtaccgcctccaaactggaacgtctccgtgaaaaaatgcaagaagctgacacgacagtccatattctttcttctcttgacgatatcgcatggctgctcaatattcgaggcggagatgtaatgtatactcctcttgtgctgagctatgctgtgatcacgatggaggacgtacatctgtttatcaacgaatccaaattaaatcaggaaattttagatagctggaacgggctttctgtcatcttacatccttatgaagaaatctacacatttgtaaagacgttagatgaaacttctcatgtgcttttagatccttcccggatcaattatgcgatctataaaaatctccctgacgcaacagaaaaagtggagaagccaaatccaacaacagcatttaaggcaatcaaaaatgagacagaattgaaaaatatccgcgcaagccatatcaaagacggggttgctttcacaaaatttatgtattggcttaagaaaaatgtaggaaagatgccgatcacagagcgcagcgcctctgacaaactagaagagttccgcagccagcaggcgggatttatcagtccaagtttttctccgattgtcgcatacaaagaacatgctgccatgatgcattacagcgctactccggaatctgattatgaattgaaaccggagcacttcctccttgcagataccggcggaaattattatgaaggtaccacagacttgactcgtacagttgctcttggaccggtcagcgacgaactgaagacacactttacggctgttgcccgcggtatgatgaacctcgcaagagcaagatttctatatggctgccggggtgtgaaccttgatatcctcgcaagagaacctatgtggtctctgaatattgactacaagtgtggcaccggacatggagtcggttaccttctaaacattcacgaaggacctgcttctttccgttggcagctatccccttcaggcctgccaccagcagtgctcgaggagggtatggtcatcaccgatgaacctggaatctacattgaagattcccacggaatccgtctggaaaatgaactcgttgtgcgcaaaggtgaaaaaaatgaatttggccaattcatgggactggaaaatgttacagtcgttccgattgacttagatgcgatcgtaccggaagatctgaataaagacgaacgcaattatctgaacagctatcacaaatttgtatacgagacactttctccttatatgacagaggaagaaaacgaatggctcaaagtatacacaagggaaatctaactatcatagattcctgccggagctaagcacagcaggttgccatagtcaaagggcacctaagatcttttttgctgatcttaggcgccctctttcagtcttctttcttttttacaatcttccgtcttcattcaaaaaatagtatccgctgattttttgaaagatccatcgaaaatttattttttcgacgttctcctgggctacgatcgggtattgctgaagtacttccccgtccagaatatagcgaaccgttccaagcttctcatatctttcaatcggcgcttgcacttcttcctgcaattctacaacagtttcaatttcttcttctcggtgcaaaagaacttccaccggactgttttgaatcttctcaatctttaccggaacatgtgctttctcaaaaagatttccgctggtaggaattcccgccttcacagttacatcacggaggggttctttcccggcaaatgcctcccgcagctcataattttccatcccatatgtcatcaatcgcttggtatctgcccatttatatcctttattgttcggccatccgcatccaagcaaggcaaccacaaatgttcttccccggctttcaagcgcgccgacatagcaataccccgccttcccggtaaatcctgtctttccggataacgctccatccatcattgtcaaaaacgcattgtgattctggcaggaaaacgaacgatggcaatctacatccataaaatgatagcttcccttctgagtaattgaaagaaagctctccttcttcggagatttcaaaatacagtaactcatgatcctggccaaatcttccgctgtcgttgaatgttctccgttgtcatccgaagcatccagcccattaggtgtaataaaatatgtatccctgcatccgatttcttttgccttcgcattcattttatccgcgaatgcctgcacactccccccaatatgttccgcgattgctactgcactgtcattgtgcgattccaacatcaaggaatatagaagatctctcagataaaacttttcatccatctgcatccccagatgtactttcggctgtctcgccgcattttctgacacattcacaacatctgtaagatttccttcctccaatgccagaatacatgtcatgatctttgtcgtgctcgccatcggctttttttctgaaccgttcttttcaaataaaacacgcccattgtccgcgtccattaaaaccgctgactgggcgtataactgttctatctcttctttcgcactgacaggggaactgaccagcaaaactcctgtcaaaattccgatcaaaactttcttcataagcatacacctgttgttctgttagttcattgtatgattagaagttcccgaatatgtccatctgaatctcttttgatcagacatccagtcgatctttgatctcccgctctgcctcttctttaaaatcttccagctgctctggtgcaatgcttggaagctcctccaccgactgcactccaaatcgtcgcaaaaattcttcggttgtgccaaatagcaacggttttcccggcgcatccagcctccccacttcacacaccagatcatattccacaagtttattcaccgcatggtctgacttcactccccggatcttctcgatctcaatttttgtaaccggctgcttatatgccacgattgcgagtgtctccagcaggacatctgtcagcacatgtttcttcggctgtttcgcaacttgaatcagatagtcatataactctggctttgtacagagctgataagaatcctccagttcgatcaactggattccccgctctttcttttgatactgttttttcagttcttccaaaagtctttttgcttctgtctcatctttcccgatcgcagatgcaatttttgaaaggctcacggactcccccattgcaaaaaggatcgcctccacagcccctagcagttccttctcagttttcttttccacactatctgttcctttcttgttatcgtacaatttttcctttttaatgcttcacttctcttttgccatgctacatcatagaagtgatcataatctccgcaaatgttttttcttgtgtaatctgtatcttacctactttcatcaattccagtaccgcgagaaacgtgacaatcacatgcatcttgctgcgctgtcttgccagaagctgacggaaactaaagtacccattcaacattgcatactcttccacataggacatcttatcagagagcgtcacttcttctttctcaatcgttccaaatttactgcgcaccggatccatcttatctgcctttttccgcatcacttcctgaaaaatctgattcaacctgcgaagatccaaatctcccagaagttcatccagatttaccggttcggtatactcctgcacttcctgtgggatggcagcctccttaaataacactctgtctgaatccatttcccgatcccgaagttcataagacatatatttgtacagcttatactgcagcaactgttccaccagctcctgcctaggatcttcctcctccccttcttcattcacctctttgggaagaagcattttcgacttaatatccaaaagagtcgctgccatcagaagaaactcgctcataatattcaaatctgtccgttccatctcacggatatactccatgtactgtcttgtaatttccacgatggggatatcataaatatcaatcttatttttgtcaatcaaatgcaaaagcagatccagtggcccttcaaacacttgcagctttactggtattcccattactgtcttcctttcatatgcagcacaactacttccggtgtgttaaacagcctaaccggtatcgtatgttctccaatccctctgcttacaaccgtcgttgtctgcccttctctgtaaatccccccactgtaacgcggaaagatcttaagctgtggcgtaatgacagctccaagaaacgggagccttaccagccctccgtgaaaatgtcctgaaacaacaagatctgccttccactctttgtatgccggcacatgtgacggattgtgggcgattaaaatctgataacttgccctgcttgcctttccaatccgctgttcaatctccgcttctgtcactttgtgatacttcctttttgcatacccctcatacggaatctccaatccggaaatcgtaaacagatcaccattccactctcgtacaaccgaacgattttcaaggaagattacctgttctgcactcaactctttcttgtatcgctcatagacatgactataatttgccggattttccttcatccgctgctcatggttgccattcgcataaaataccggacagatatttgcaagtgatttcacaaattccatcgctggctttggatataccccctttttccccactagcatatcccctgcgatcagaattgcatctggtctctgctttgtaattgcatacagcagtcttttattatgttttccatatactttattgtgaagatcacttagcaggacaaactttgtctcttcccccacaagctttggggctgtcaccgtataatgtgtgactttaaatgtgtggatttcacgtatcatctccaatacacaaagaactgctgccaccgcaataatctctaggacctttacaatttctctttccatatctgttcccttatcctctttcactgtctcatttcatctcacagcaatgctgatttgtcttccattatataatttttctcagcgttttacaaccaaaagcttttcagcacctttttcagcacatgtccataagtaatcttatctatcttctctgttgttctgaccggcacagttccaattgtttcttcctgcagtgtatacacaagttttcctaccgttgttcccttctttagcggtgcagaaagccctttttttaacactagttttttctgtatctcagacaaatttgctccggtcgtatccacatactgaaatattgcttccggctcgatcctcactttttcctttgtccccccatccacttttaccgcctttaatccacctttttctttgtccacatactttgtgcattttccaaatccatagtttaaaagtgttgtcgcatcctttacgcgcatcttagaatccggcgccgccatgatcaccgcgatcaaatccatcccatcctttcttgccgtggcagaaatacagaattttgctttacttgtagatccggtcttaagccccgtggcatatggataatgacgtaccagtttatttgtgtttgacaaaccaaattcgcttgttcccttgtttgttttatgcgtaatattttccatccagatcatagaatatttttcaatctccggatgctttgtgattaattctctggacatcagtgcaatgtcgtaagcagtcgtcagatgtccatccgcatccaaaccattgcagtttacaaagtgagtatgctccatccccagcccttttgccctcgcattcatctgctctacaaaagcctcctcacttccggatatgtattcggacatcgccacacatgcgtcattcgcacttgcaactgcaatgcactttaacatcgtatctaccgtctgcacttctccgggttctagaaacacctggcttcctcccatggatgctgcatactctgacacagttacttcgtcttccaactttatctttccatcctccactgcatccaggattaaaagcatcgtcataactttcgtcacacttgcaggcgggcgttcctcctccttctgtttctcataaataatttttccggtagatgcctccatcaaaacggcggactgtgctgtcagttccagctcatttttcttttctgactctacctcttcctgcaatactttcccgtcaggcggcatcgcgcagacagtcccggtacataaaataacgctcaatactactgccagaattgttctcattttacaactccctttgatttcgtctactaccattgtaagcattgtgtgaaagatttatgactgttcctaccgttctttctctttgagttctccttccctgtaagcccggatcagctcttttaattctgcaattctctctttcatcttgttcccattgtcagtatccccgacaagctgacgcctgtctgtatattttactgccacctgtctagaaacgatatctttctcctcatggatcgccatctctgccgattcaaacggttcatgtgctgtcagtgtcatgccataagaattatagattaaagtataccccgcaattccggtctccttgtggtatgcccttgaaaatcctccgtcaataatcaataccttaccaccacattttacagggctctcccctgagctctgatgcaccggcacatgcccgttgataatatgtgcatcttccccctcaagaccaaatgcttccagaatccgctcagcagtactgctctcttctaaaaatcggtaatatgcattcttcttttccaaatgtgcttccggttctgcaatcagatacctttcaaatgcagccatcttgcttcttccaaacaacggagatttcggtccactccagagataccataaaatatcctgtcccttctttcgctcaccttcttccaaggcaacaaaagcttttcttacatacatttcaagcacatcataaagctttctcccctgataaaatgttccaaaaatattgaccttctcaaagctgccgtcttcttccagcggaatacacccatgatagagcagattgtgattatacaccttgtaaagacttccattctttaaaagcagcttaacatgtctttgcagtttctcacagttttgaaacgctgtttttagtttctccatgatttcctgttcacctttgcttaaacgatatggtgcttcttcagaaatcgtaggaaagctcttgtcttttaaccgatattcttttccctgtatgatcacagttcccttcttcttatcgagtgtctcaagaaaacatcggtcttccatatcaaaatcaggatgctccctcagaagcatttcctccagtttaaactgaattatcgtaatcgctttgtgcattcttctctctaacagagaggaggaatctgtttttccctctctccctttcacagcgaaacatacacaggggtcttctccatagatttccattgcaaatgcagctaacggaagcaaattaataccatatccatcttccagaagatctagattgccataacggagacagattcggatcaccgtcgcaatacatgctacatttcccgcagccgctcccatccaaaggatatcatggtttccccactggatatcaaacgagtgatacgtcataagacagtccagaattttatccggtgcgggtcctctgtcaaaaatatcgccaataatatgcagatgatcgatcacaagtctttggatcagctctgacatcacaatgataaaatcttctgcctttccaatctccagtatcgttgtgacgattgattcatagtacgcacctttattcagcacctctgatttctctgtgatcagttcttcaatgacatatgcatagtccgccggaagtgcttttctcacttttgatcttgtatattttgaggagactgtcttgcatatttcaatcaatcgatacaatgtaatcttgtaccagttctccatatctggctctgtttttttgatctcagcaatcttttctgccggataatagatcaaagttgccatcgcacacttttctgccgtactcagtgtatggccaaacacatcatcgatcttctttctaaccgctcctgatccattgcgcagcacatgtgaaaatgcctcaaactctccgtgaatatctgatataaaatgttcagttccttttggaaggtttaaaatcgactggagattgataatctctgtggatgcctttccaattgtcggatataattctgcaagatattctagataatttttattgttttgttccatgtttcttcctttcattcttattgattttctctgtactgccagtccccacaagcaggatatgagatagctaaaatagcagggatttcccctgctatttcagcttctctactctctcctgcaccgtcttattaaaattctctacttttcgattatatggttcattcatatattttgaatgcaacataaagtctgccgtcgccagattgtttgcaatcggaatgtcatatacgactgcgatacgcaaaagtgccttcacgtctggatcatgtggctgcgcttctaacggatcccacaaaaagatcataaaatcaatatttccctcaacaatttttgcaccgatctgctgatctccgccaagcggtccactgttatatcctttaaccggaagtcctgttttttcagcgatcaaccgggatgtcgtccctgttccacagagaaaatgtccttttaaaatctctttattcttatcgcaccactctaccagttcttttttctttccatcatgtgcaactaatgcaatatgttttgcctttccaatctcaaatgtaacataatcatcctgtaacataagcgtcctccttttatttagactttttctctttcttctacacaagccgcagctttttcaatcgcgtttcagctttattatacacaatttttctctatttaggaagccccttactgttttgcgacaatctcgccttgttttttgtaaatacttcccgctggaatcactccgcgcaccatggaaagaggataaatgtttgtatgacttccaatcacacttcctggattcagcacacttccgcagccgacttccacctcgtcccccagcattgccccgaattttttcaatccagtctcaatcgtcttctcgccgactttcactttcacaagtgatttatctgactttacatttgatgtcactgccccggcacccatatgagatttgtatccaagaattgaatcgccaacataattataatgcggtacctgtactttattgaataaaattacattttttaactctgtggaatttcccacaacagctccttctcccacgatagcatttccccggataaatgcacaatgtctgatctccgcctcttttccgatgatcgccggaccatgaatacttgcagttgctgcaacctttgctgattttgcaacccagatatcctctcctatcttctcatattccgtctctggcaatgcgctgccaagtttcacgataaatgctccaatctttggaagcacttcccacggatatgtcactcccgcaaaaatctcactggcaatagtttctttcaatgtatacagttctgttactgtcatctgctccatatcttctttcctttccatcttctaatctggtttcccatgtctctgtttgaaatgaacatctttctttgctgtcattttcggtttctgataaaatccagcagccctgtcatagcaggcacgcagctgatattgattattcaatcccaataccccatttgtatgattctgtacaaaccgttccagcttcaccatatattcctccggggtaatctctccctctgccacatagttcaagcctttctcccagctcgctgtcaactcaggatttaaaagagagcggatcgaatgtccaactacatcaaacaccatctccccaagaagcgtcggagtgatgatctgtgtcttcttattcagcgcgagatacttaatatgtatcaacttctttaaaatttctgccctcgtcgcacttgtgccaatgccgcttccttttatctgcgcacgcagttcctcatcttcaatcagctgtccggcattctccatcgcaaggatgatcgaaccagaattatatcgtttcggaggagatgtctccccctctttaatctgaaacccttgcacatttaactgcatccctttccgcagtttctgtacaagagaaaatagatcttcatcttgattttcattgtcctcgcctgcatcctcccctttttttgtccccggcacacctgttactttcagatacccttcttctgcaagtactttaaaagaagagaaaaactgttcttccttccgcttggtcacaatacttactttctgatatactgccggcggataaaagatgcttaaaaatcgtctgacaatcagatcatatacctgtctggcagtcggtgctaccgcctgcaatgcaggaagtccttgtccggttggaatgatcgcatagtgatctgtaatctgcttgtcattgacatagcgagttttctctagccctttgtgacttccaaaccgtaaaatatcagatagaaacggtcctgccatctcatatttggaaagaccattcagatttttatgaatctcttttgcaaccgcagtcgacagcacacgcgcatcagttctcggatatgtaaccagttttttttcatagagttcctgtacaatccggagtgtctcatccgggctgattttaaaccgtttggaacattcattttgaagctctgccaagttgaacaacaacggcggatttttcttctcctttttcttctcgatggagaggatctcacaagtgagcggaagcggctgactcaaataagcgatcaactcctcggccttctctctcttctgaaatccattttccttgtagaggtcaaacgattcaaaataccgtgagcctttgactgccctccactcaccttcaaatgtctgtccttccacatcaaccgtagagattacacgaaaaaacggtgtcttgacaaactcgcggatttccctttctctccggacgatcatgccaagaacacatgtcatcactcgtccaaccgaaagcactgtatagttggtttgcaagtaattcgagatgctgtttccatactttagtgtcagcaatctcgaaaaattaatccccatcagataatcttcttttgcccgcagataagcagatgcactcagattatcataatcttccagtggctttgcctcctggatcccacgaagaatttcctcctctgtctgggaatcgatccagacacgcttcctcacttttcctttcactcctgccatctgctctaccagacggtaaatatattctccttctcgtccggagtcggtacatacatagatggtatccacatcttctcttgtcagctgttcctttacaatctgaaactgctttgcaaccgccggaatgacttcatacttaaattcctttggaagaaatgggagcgtatccagcctccatctcttcaacttcgcatcatatacttcgggataactcatcgtgacaaggtgtccaacacaccatgttacgattgcactgtccgcctccagatatccgtcttttcgtcttgtattcaattttaatgcctttgcaaattcctgtgcgacgcttggcttctccgcaatatatactgattttcccatgtgtacctactttactgtaaaatgatatgccgttgttgtatgatatgtgctgccggctttgcagactggatcttcaaagtgctctttgtggatcgcatccggaaaatactgcgtctcaaaacatgcaccgcttctctttccatagcagattccctcttttccttcttcatgttccacaaaattagcagtgtaaaactgcatacccggaagatccgtccacacttccattccaataccactttctgctccttccatctctgccaccttacggtaagtacccggatggttcagtacccagttgtgatcatatccatttccaagccgaattgcctcataatcgctttcaatctcttcgccgatcatcttgccggaacggaaatccatcggtgttccttccaccggaacgatctctccggtcgggatcgattctgcatctgctctcgtaaatgtatctgcatcaatccagacacgctgggcaagcacatcctttttctcatgcccgtcaagattaaagtaactgtggtttgtcatattcagaatcgtgtcctgatccggcacagcgtagtactcaattttcaccgtgtcatcttcagtcagtgtatatgtcacttcgattttcactgttcctggatatccttgatctccgtctctgctctccagtgcaaatgtaagttgattgttgtcctcttttatcacatcccagatacggacattgaagaaatccatcccactgtgcagattattaccattattattttgtgcaagagtgtaagtctttccattcagctcaaaagaagctcccccgatccggttcgcacatctcccgacaattgccccaaaaaacttacttgcctcttcatatttctgtggcgtatcatatccaagcacaacatcttttggagttccatttttatctttgacgatcacctttactaacgtcgctccaagatcagtcaccgcaatctttgtcccatgctgattggaaattgtgtaaagtgaaacactgttcccttgttttgttgttccaaatactgttttctctatactcatcgttcttcttcctctctgctctgcttattttttatgaaaaatttcaagaaatcttcggatcacttttggctctcgcctcttttctgacggtctttcctgaagcgcctcccgcataaatacttcctgcgcattcacctcacgctctcttatttctttctttttatatgtcccgtcacttgtcaggatacgggccttcacattgtccgacagcatgaccttcaaaagatggtttagttgccgtttcactatcggatcatagaccggacatgcaacttctacccgcttttctgtatttcttgtcatcatgtccgcggaaccaatgtaaatcttttgctcctcccggaccccgaaactaaaaattctggcatgctccaggtagcgcccgacaatactaatcactcgtaaattttctgtttccccttcaatccccggtagaatacagcaaattccccttacgatcagatcgattctgactcccgctctggaagcctcggcaattttctcaatgaaatccatatcggttaccgaattcatcttcatgacaatcctgccatttgtcccctttgcgatctccctatcgatcaacaggagaatcttctgttttaaacttgtcggcgccacgatcagttcttcatatcttccgtcaagattactgattgacatatttttaaagaattcagctgcatcttccccgatactccgactggatgtcatcagagagacgtccgtatacatctccgctgtcttctcgttataatttcccgtcccaatctgagtgatatactgtatctcattccgatggcggtaggtgatcagacagattttagagtgtactttgtatccctcaaatccataaatcacccggcatcccgcctcctcaagcctttcagaccagtcgatgttattctgctcatcaaatcttgcccgcagttcgatcagcactgtcacttcttttccgttctctgctgctgcacacagatactctactagccttgtctttcgtgcaaggcggtaaatcgtaatcttaatcgtcatgacattcggatccgcggacgcctctttgatcagacggagaaacggttccatactctcatatggataagaaagcagaatatcttttcttcgaatctgcttcatcatactgccttcctccaccatcttcgccatctgcggagaaaacggctcatacgtcagtgcacgcttcatagaatctggcgccttatcgatcactgagaacataaacccgagcttcatcggcacttttgtacgaaaaatctgtttcggtgtaatgttaaatttaccgcaaaaatactgttcccgctctttactgagactctctgccacttcaagacggacaaccgccattcttctccgcttatgtaatgtctttttcatccggtaacggaaatcatcattgatatcaaacgcttcatcatccggagaaatgtctgcattccttgtcacacagatataatttcgatctgagatctcatactgactaaaaatcagttccaaatactccatgatcactttttccatgcgaatatatcgaatgtcatgtccgggaagatataagatatcagaaataaactgcggtaccggtacaattccaagtaacgatctgccattctccttcaaggttgccgtcacatatatttcattgttcaaaagatgtggaaatgggtggtttggatctacgatctgaggtgacaaaagcggaaggatctgctctctgaaatatttttttacaaactttttctcttgctgttccagctccttgaaagacaacccacagattccatacggacttaactgtttcttgatctcctcgtatgtcttctcccgctctttatagagcggtgcaaccgccgtatagattttgtccaactgctgccttgcactccatccagtcttatcgtcaatatgattttctcccatcattcccatatcatagagacttcctacccggatcataaaaaactcatccaaattgctcgtaaagattgcgacaaacttcatccgctccaaaagcggcactgtcggatcctgtgcttcctgaagcacgcgctcattgaaccggagccaggacaattctctgttctgtgtgtaattcaatagttcttttctcatttgaacaccttcctcttttcgcagttccaatctttctttatcaattttcagtataacaaatttcttatttcatttccataccctgccccaaactcctccagaaagagaaaaaagaggttctgcaaaactgcggttccccttctctcttttcctttctattttgccttgatatatccttttgcagtcagtgtttctgcacagagcacagcgcctcctgctgcacctctgactgtattatgggaaagcccgacaaacttataatcgtacacggtatcttctcttaaacgtccaactgagattcccattcccttctcaaaatctacgtccaattttacctgcgggcggttgtcttcctcaagatactggataaactgctttggcgcacttggaagttctaactcctgcggcaggccacggaatgttacaagcttttcaatcaactgttcttttgttggcttctttgcaaatttcacaaacactgcagctgtatgtccatccagaaccggaacacggatgcactgtgttgtaataacaggactgcttgcttttacaatctcaccatctttgatctgtccccagattctaagcggttcctgctcacttttttcttcttctccaccgataaatggaatgatgttctccaccatctccggccactctgcaaatgtctttcctgcacctgaaatcgcctgataagtcgtagccacaacctctgtcggctcaaattctttccatgcagtcagcaccggtgcataactctggatagaacagtttggctttactgccacaaatcctctctctgttccaagccgtgctttctgcgcttcaatgatctcaaagtgttccggattgatctccgggatcaccatcggcacatcttttgtccagcggtgtgcactgttattcgatacaaccggtgtctcagtctttgcataagcttcctcgattgccttgatctcttccttggacatatccactgcgctgaatacaaaatcaacacccgctgcaactttctctacttcattgacattcatgactactaaacttttcactgattccggcatcggtgtctgcatcttccagcggtctccaaccgcctcctcatacgttttcccttctgatcttgggctggctgccactgtcactacttcaaaccatggatgattttccaaaagagaaataaatctctgtcctaccatccccgttgctccaagaattcctactcttaattttctctccatctttctttcctctctttactaaaccattatatttatcaatcctgtgcggaaaacgtatccgactgggacaaatatcgtttctgcagagaaatcacctgctccatcacttcccgccccggtgcaccaaatgtcttgcgcttctccacacaagtcttcagactgatcgcatcataaatatcttcctgaaataccggggaaatcctctgatattcttccaaactcatctcttccaatgaaattcccttctcaatgcagcttaacacaagctgtccgacaatcccatgtgcatcccgaaatgctacgccatggcctacaagataatctgctgcatctgtcgcattagtaaatccgtttttcgcgcttctttccatctgttccttctgaaatctcatcgtgcggagcatatctgtaaacaacatcagacatccctttgccgtatcgatcgcatcaaaagcaagctctttgtcttcctgcatgtccttattataagcaagcggcaatcctttcattgtcacaagaagtgacatcaacgctccgtaaacacgtcctgtctttccacgaacaagttctgcaatatccggattcttcttctgtggcataatgctgcttccggtactgtatgcatcatcaatttcaacaaactggtactcattgctgttccagataataacctcctctgaaaagcggcttaaatgcatcataaccgtagacagtgcggctaaaaattcaatcagataatctctgtctgccacagaatccatactgttccatgtggcacctgcaaaccctaacagttccgctgtatactctctatccaacggatatgtggtaccagccagagctccagagccaagcggacagtaattcattctccggtaaacatccttcatgcgggctcgatctcgcttaaacatttcaaaataagcacccatatggtgtgccaatgtgattggctgtgctttctgcagatgagtaaatcccggcatgaacgtatcgatatgttcttccatgattccaagcagtacctctaacaattccttcaaaagatgatccgtcgcatacacttcatctctgatataaagcttcatatcgagggcaacctgatcatttctgcttcttccagtatgtaatttcttgccaggttctccgatccgctcgatcaaagtcgcctccacaaaactatgaatatcttcatatttctctgaaatcgcaagagaaccgtcttctatatcccttaaaattccttccagaccggaaatcattttccgttgttcttcttctgtcagaatcccttgctttgccaacatcatcacatgcgcgatgctgcctctaatatcctgtgcataaaaccttttgtcaaaagaaatcgatgcattgaactgatataccatctgatctgtttcttttgtaaatcgtcctccccacaattgtgccatatttgttcctcttttctgttgcttatttttcatagtctatcatatttttatataattttccaatattatctgctctttttacatattttttctttctcttttaggattttttacctattttcactttttagcatttctttcttctgagcttctcgctcttgttttgagaagatacagccacagtaatcctgccggtaaagtccatacaatcccgataattccaccgagcgacggtatccattcttcttcttaaaatcagacagaagataaggaacccctatctcttccccgatccgctctccaatttcatttaactttgcagcatttttcatcgggctgatactaagtgtcgttgtaaaataatcaaaattgccctttttcgcttcccttgccgcctccaaaagtctcagttcatagcagcgaaaacatcgcctgccgccttctttttctctctccatcccttttaccgcatcataaaacagctgtttatcatattctcccgccagaaaagagattggatatttcgccgggagtttctcaatcagttccttttgttcctgtacccgcttgtcatattcggtatccggataaatattcggattgtaatagaacactgtaatatgaaaatactgagacaaatactccagcacataactactgcaaggtgcacaacagctatgaagtaacaaagatgggactctgccatctttttcaaactgttttaacaagttctccaactctttctgataatttctctttggctgtcccgatatcttccggttttcttccttttgattcatcctcccaccatctgttctttctttcattttcttcaccctttgccctttttcttttatttctcctgctgatattatacacaactgatcaaaaaaaacaatccgcgtttttctgattgctctatcaccgcaccattttctttcttttgcataaattggatagaaacagactggaggcttttatggaaactatattagaatttcaaaatgtcagttatgcctaccacacgctggatggagagacacctgctttaagccacatctccttttcggtaaaaaagggagaatttattgctatcgtcggtccatctggctgcggaaaatccacactcttatcactgatcgcagggctgctccaaccggaggaagggcagattctgatccatggaaaatccgtagagctgcgcaatgccaacattgggtatatgcttcagaaagatcacctgtttgagtggcgctccatctatcggaatatcatccttggcctggagatccagcacaaattgaacagccagacaaaagagaaagcaaacgaactgctagccacttatggactgcaaaactttgccaaagcaaaaccttctgagctctccggaggtatgcggcagcgcgctgcccttatccgcacactggtccttgatccagatcttctccttctcgacgaaccattctctgctctggattatcagactcgtctgacggttggagatgatatcggacaaattatccgaaaagaaaaaaagacagcgattcttgtcactcacgacttatcagaagcagtcagccttggagatcgcgtcatcgtcctctctgcccgtcccgcctctattcaacagacgatcccgcttcactttgatatgcaggaagatactcctcttcttcgcagaaatacaccggaatttaaaatatatttcaatcttgtctggagggaactaaatggaagtgaatgagatgtccgtaaaacaacaggaatttttaaaaggcagacagaagcaccggaccatcgtctctgtcttccgggttctgatcttgcttctcttttttatcctctgggagatttcctctgcaaccggactgatcgactcgtttatcttcagcagtccttcaaaaattgtccgctgcttctggaatatggtgtgcgatcgaagcatcttcctccacgttggtgtcaccgtatatgagacaatcgtaagcttccttcttgttatcttcattgctctgctctgtgccgtttttctctggttcagcccgaagctttccgagattatggaaccttaccttgtcgtgctgaacagccttccaaaatctgcactggcaccccttctgatcgtatggctcggcgccactcaaacaacgatcattgtctctggaatgtctgttgcaatctttggaagtattttaagcctatatacaagctttcatactgtcgatcaagagaaaatcaaactcatctatacgctgcacggtaccagattccacgctctcacaaaagttgtaatccctcactccattccggcaatcatcagcaatatgaaggtcaacatcggcctatgcctcgtcggagtgatcatcggagaattccttgcagcacgaaacgggcttggttacttgatcatttactccagccaggtctttaagctcgactggctcctgatggctatcgtcctcctttgcattctcgcaatgttcctatatgcctgcatcaacctgcttgaaaagctatacctcgaaaaacgccactcttgatcactactattgcaaagagccccttttcaatacgaaaaagagggaacctctcgcctttcgagaaagttccctcttttttttcaaacatcattggatatttttgttatttctccatacttcccaatgcttttttcttccattttccacgtttgtaaaagtaaaatgtaatcaacgcacccagcacccaagagcaaagcaacgaaatgaaaacgcactcagaccgtccatttggcaattctgctgttcttgtgatccaggaaattccataggcaaccggtacacggatcagcactgtcgccacaagcgagatccacatcggcgtcatcgtatcacctgccccacgcatcactccggacaagcactgagttgcccccatcgcaatatatccaaccgcaagaatacgcatcatccgcatgctgagatcaacaagctcctcagtctctgtaaaaattcccatcagatatttcccaaagatcaaaatcagcccggtaatagtcgccgatactcccattgcaatcagagttccctgctttgctccccggttgattctatcatattgttttgctcctgcattctgtccggcataagtcgtcatcgctgttccaaaagaaaagtttggcatcatcgcaaacccatcaacgcgcataatgattacatttgctgcaatgaacatctccccgaaactatttgtcaatgactgcacaataatcattgccattgaaaaaattgcctgtgtcaagccggaaggaagtcccaggcggataatctgtgccgtatgttctctgctcatttttaagtgatgttttctaaactcaaaaatttccttcatatgcattaatttccataaacaaagcaccgcagagacaaactgagcgatcactgtcgcgagggcaacccccgctactcccatatcaaacactgcaacaaataaaagatccagaccaatattcaataccgttgcaacaagcagataaacgagtgccgacacagaatctccaagacccctcagcacaccacttaatatattataataagccatgcctgcaatcccgaccatcataatgatcagataggaagtacaccagtcgataatgcttgccggtgtgtggagcatttccaacatcggtcgcacgacaaatggagaaacaatcatcagagctattgcaacaatcgctgtcagcgtcacacatcctccgattgtagatgataattcttccctttctttcgccccaaaatactgggcaaccataatactcaccccaactgaaattccaataaacagtacgatcagcaagttcaaaatcgggctggcacttcccacggctgccagagcattatctccgacatagcgtcccacaataatactatccaccgtattgtataattgctgcgcaatatttccgatcaacatcggaatcgtaaacaggacaatctttttccatggtgttccttctgtcatgtctgtcggtgtaaacaattttttccacatttgtttcatttccctcactccctctttcgttttgttctgtaataaaaaagcagatatagactctcacctatatctgcctgccattcagctgaaaatcggacttgaaccgacgaccccttcattacgagtgaagtgctctaccgactgagctatttcagcacgatatgatatattatatttattttctgcaaacttacttttctctgcaagttgctacgaactatagtataataaaaattttctgaaaagtcaagtttttttattaaaaaacggcaaaaagtggaagagattgggaactttttgccgcctttcttatactgcttttctattagctttctttttgaatatgaacatccatttgcggataaggaatgttgatcccctgttcatccatcgtcagtttgatttcctccaacaatctccatctggtcggccaataatcatcggttttcacccaggactttgacccgatcacaacagaactttctgccagttcatcaacatacactatgatttcttcatcttttaaaatactctcatcttcaagaagaagagattcgatcacttcctttgccttccgcaaatctgactcgtaggaaatccctactttaatctccaagcgcctcttctcttttgctgtcacatttgtcagactattattagacagcgcaccgtttggaataacgatcatccgattgtcaaccgttgataactttgtatagaaaatttgaatttcctttaccgttccttcatttccagttccactttcaataatataatctcccactacaaacggtttcaaaagaaggatcaaaactcctcccgcaaagtttgaaagacttccttggagcgccagaccgatagcaacacctccggaagcaaagagcgctgcgatcgatgtcgtatctactccgaaatttgccacaagactaaagatcagaatacaataaagcaccacttttaacattgaatctacaaactgctctacccctttatctacgtttgcccgatttaaagatgctctgactaatttctgtacccaccggatcagctttcttccgataaaaaagcagatcaatgacaacactactttcagaccaaaattaatgatgttcggaatctgagaattgacatattcgaccaaccggtttacatcttttgctgcttcttctacattttctgctgctgtttccatatccatagatgacctcctctttcgcgctgtaaatttagtttatcttccactgtttattctaacataagaaatgccccaaggtttcctctcttcccctgtgatgcccgatgcgaaaacaggagttcactgttgcagcaagtacagatatttgtcactgcaatctgctccttcgggattcctgcctcctgcagcacaatgcgatttgcctcccagagatttaactggtatttcccattttctttttcataaaataatttttcccagtatttctcatcatagttttccctaaactgctcaacaacatctttgctgacctcatagcaatcctgacaaatcgacggtccgactgccgcgacaacatcccttggatctgttccatacagttctgtcattttctccaccgtcacttttccaatctttccaaccgtgcctctccatccagaatggctgagcccaatcgctttttttaccggatccacgaaaaaaagcggcacacagtctgcataaaaagtagcaaggcaaagtccgggttcatttgtcacaagcccatccacatccttatacccttccgggcatcccgtaacacatgcctgcggaaataaaaatccttttcctgcatcgtcttttgttactttccgcacattcgttgtatgtgtctgcgcagaaaagacatactgctctggcgaaatctcaagcacttctgccatccggtaaaaattctcccgcacagcttccggatcatctcctcgggaaaaacttaagttcatcgaggcatagattccctcactgactcctccaagtcttgtagaaaatgcgtgtctcacacacttcgtatgttctaaaagcgggtaggacagataggttactcccgttttttcttttacttccaatacgtttctttcgtctgttttcttccaacgattctccaatgctctctcctccctttatttttcgttaaacatctgtgcaccatatttatcctggttctcaaaatgcatcccggatcagacagatctcccgtcctaaaatactaatcacatcgaagcgacaaggcatttctcctatcccatactcctgcaagtatgctgccgcacatttgtagattgtttgctgcttcttgattccgactgcctccgccggttctccttttctcgtatccgagcgatacttaacctcacagaatacaagcacctctccgtctttcgcaattaggtcaatctccccgtatctgcaccgataattacaggaaagtatctgaaagccacatgcttccagatactctgctgccattttctcatactcccttccgatctgtcgctgatttcccataaaatgctttcctctctttagatgaaattgtggataaaactacgacgatggatcggtgtcggtccatattttttcaatgctgcgatatgctctgacgagccataccctttgttcgatgcaaatccatatccaggaagtacctcctcatattctgtcatcagccggtctcttgtcaccttcgccacaatacttgccgcggcaatcgaaacacttttggcatctcctttgatgatcggcacctggacaatatgcggaggaatcatcggaattgtaactgcatcatttagaaggacattcggctccacacaaagcttccctacagcctcccgcattgcctcatacgttgcctgaagaatattgatctcgtcaatccgtgcaggacttacaattccaatcccaacagctactgcttcctgcatgatcacctcatagagttcttccctgcgtttctccgtcaattttttggaatcattgagataaagaatctggctgtcttttggaaggattacagcccctgccacgaccggacctgcaagcggacctcttccaacttcatcgatcccgcagataaatgctgcatcccggtatttgttttcataagatttcatcgcctcaatgcgggcaatctccgccgcaagcttttcttcctgctttttgtattttgcgatcagagcagtcacacctgccctcggatcatctgcatactgttcatacagtacctttctttcacaatcatctgcctgagaaaattcctgctgtatttcccgaatgctcttactcatgttttatcactccaaactctgaaaatggccagatccgtacccacgctcttccaacaagatcttctctctttaaaataccaactctagaatctctgctgtccatgctgtggttccggttgtcacccagtacaaaatattcatcttctccaagtgtcactggcacttcggcgatccctgcatcctgcatcacttctgttccatactcctcaccgagtatctgtccgtcaatgtagacttccccatcgataatctgtatggtttcccccggcattccgataatccgcttaatatagtatgtattttcctgatactgatacggaaagacaataatgtcataccgctccggatcccggaaccggtaagagattttgtccacaatgagattgtcaccatcactcaaggtcgtttccatcgaggaaccggtaacacgcgtacgctgtccaacaaatgtaatcacaagatacgtcagaccaaaaataatcagtatatataccagccagccaagaagttccttaaaaatatttttttcttctgctaaatacttttcttcatcgcttttcatttcttaccgccttcttccttccgctttttctactcatagtcttccggaaattccagcgtgatccttccaagctttccactccggaagtcgtcgatcagcaggattgcggccttatttgtgtcaagttcatttcctttcacaagacaatgtctgctttctgcaattcttctcaggcactcataggagtcttcactgatctctacgctatatttttcttccagaacgcccggatatttctctgtcagaaaagtgatcatctccatcgcaagttcttctgtatttaaaatctcatccttgatcgaaccgataaacgcgagccgaagacccactgtctgatcttcaaatttcggccagagaattcccggtgtatcgagaagttctacgtttttattaagacggatccactgttttccttttgtgacgcctggcttatttccagtcttcgcgcatgctttgcctgcaagagcattgataaatgtcgactttccgacatttggaatcccgacaaccattgcccgcaccggacgatttaagataccgcgctttctgtcacgctcaattttttctttacatgcctcctgaattacgccttggatcgacttgattccgcctcctcttttcgagtttacttttacaactgaaaatcctttttccttaaagtattctgcccaggcatcattctgtttttcttccgcaaggtctgacttattcaaaagaatcagcctcgccttattttttccaagctcatcaatgtctggattccggctgctcaccggaattctggcatcaaccaattcgatcacaagatcgatcaattttatattttcctgcatcatacgttttgcttttgtcatatgacccggataccattgaaaatgcatctcttttacctctatctttctatcagtcttttatcaatccaaaatgttgtgtcggcaacatgacaaaccatgctttcccttctatctcagagcgtttcactgtaccgatatccgcctctctgctatcttcactcgccgcccggttatctccaagtacaaaatactcatcgcctccaagcaccagctcttccccggcaattccggcatctctgatctctgttgtctggaaatcctcttttaacttctctccattaatataaacagcattgtccttcaattggatcgtttctccgggaagtcctacaatgcgcttgatcgaagcatgggcattttcattcccatttggccggaacacaataatatcattccgcttcggtgtgcttgtgtcataaatcagtcggttgacaagcacaatgtccccattatgcagcaccggattcatcgaatcgccaatattgctgacccgctgtccccagtaccatacaagcacaaaggcgatgatacatacaatcgcgatctgcatactccataccagaccattgcggattttctttatatattctctcttcctgcttcttctgattccgtatcttttcattcgcacctctgtgtctgtctttcttgatgatagaacaaaagggacaacatacattccgtactttgtcccttcctcttgttactattttactaattcttttacttttgctttcttaccaacgcggtctcttaagtagttcagtttcgctcttcttactttacctctgcgaacaacttctactctctctacgtttggtgagtgtaatggccaagttttctcaacaccgattccgttagaattctttctaactgtaaatgttgctcttgtgcttccaccctgtttcttcagaactgttccttcaaaaacctggattctttcacggttaccttctttaatttttgcgtatacttttacagtatcacctacgttaaattcaggtacttctgcctttaactgctcagcttcaattttcttaataatatcgttcatcttgtgtgacctccttattatttggacgttcctaatacatgatttgtatcagaggaccatctctttacttcacaacacgttacattttatcatgctctattatattttgcaagttttttttctctttttctgtaagttctgccttatccagcaaatccggtcttcgttgccatgttctcaaaatcgactgttctcttctccacttttccacgttggcatgatgtccggatagaaggatcggcggcacttgcttgtcatgccagatttctggtcttgtataatgcggatattccaacagattatcctgaaaactctcaaattctgccgaagtatcattgtgcagaactcccgggatcagacgggataccgcatcaacaattaccatagctggaagttctcctccggtcagtacatagtctccgatggagacataatctgtcacgatttcttccaacactcgctcgtcaattccttcataatgaccgcacaagaggatcagatcttcttctttcgcaaactcctctgccatactctgggagaaagtccccccctgcggtgaaagatatacgacacgtgtacgcccttcttttccagtgcgttcttggatagaatcttccaccgcgcggtatgcgccgtacactggctctgcctgcatcagcatacccgctccgcctccatatggataatcatccacccgattatgtttattattcgcataatcccggatattaacagcctctaccgaaagcagattatttgccattgctcttccagtaatacttgtcccaagtccatttaagaccatctccggaaataatgtcagtatatgaaaatgcatcctttataccagcccttctaacagatgaattgtcatcttctgctcttcgatatccacattaagaatgcactgtttgattgccggcacaaggacttcttttccatccgtcgtgtcgatgatatacacatcgtttgccccggtttccagcacgtcacggagcgttccgaattcagctccatcttcggtaaatacatgcattccgatcatatcagcaataaaatattcatctttttttaattttaccgcatcttttctgtctacgagaagacttttccccttatacttctcgatgtcatttatattatcaatccctttgaatttcaaaatcgcaaactgtttaaaaaacttcacctgctccacttccaaaggcaactgctcttttcctgtatctaataacacatgcttcagcttcttgaagcgcttcacatcatctgtggtaggaaatacttttacttctcccctgacaccgtgcgtgcttgagatcactccgacctgaaattgttgttccataagatctttctctgcctgtgctttcttatttccacccggcagatgctcctttcctgcttccaatgaatccttttaaaaaaatagataccgctctactgagcgatatctacaactactttcttatcttccttcgcagctgctgcctttacaacagaacggatcgcctttgcaattcttccctgctttccaattacttttcccatatctgcatcagaaacatgtaactcaatcacagttgtctttccctctgttttctctgtaactacaacaccgctcggatcatctactaatgctttcgcaattacttcgactaattctttcatcacgcgcacctccgcggctcagattatttttcgattccagctgctttgaaaatctttccaactacttctgttggctgagctccgttgtttaaccatttcttagctgcttcctcgtctactttgaaagcgcttggctcctgattcggatcatatgttccgatttcctcgataaatcttccgtctcttggagatcttgcatctgctacaacgattctataaaatggtgctttcttctgtcccattctttttaatctgatttttactgccatttcattcacctcttcatctttctcttaaaatttgttatctatgtgctaaaaaggaagcttgaatctgccttttttaccacctttgccgcccattaaattcggaagctgcttcatcatcttcttggactgttcaaactgcttgatcatgcggttgacttcactgatatctactcccgcacccttcgcaattctatgcttccttgatgggtttaaaatctctggattccggcgttctttcacagtcatagaataaatgatcgcttccatctgtgccatcttcttctcgccttcctcagaatcaaatcccttcatctgtgccatgttcattcccggcatcatactgaggatactggacagaccgcccatttttttcatctgattcatactttccagataatcttcaaaatcaaactgggccttcttaatcttcttgcccatctctcttgctttgtcttcgtcaatgtcttctccgaccttctcgatcaggctgagtacatctcccataccaagaatacgggatgccatacgatctggataaaactgctccaaatcagaaagtttctcacccattccgacataaagaatcggctttcctgtgactgcacgaatggaaagtgcagcaccgcctcttgtatctccgtcaagctttgtcacaatgacaccatcaattccaatcttctgattgaaatcatttgccacattaaccgcatcctgtcctgtcatcgcatcgactacaaggattgtctgatgaacttccacatgttctttgatttcctgaagttcttccatcatctcctcatcgatatgaagacgtcctgccgtatcgaggatcacgacattgtttccattttttgcagcatgttccatcgctgctttggcgatattaaccggcttatgattctcacccatcgagaatacttccacgccctgcttctcaccgttcacctgtaactgcttaatcgctgccggacgatatacatcacacgcaacaagaagtggcttcttccctttcagcttcagctttcctgcaatcttcgctgttgtcgtcgtcttaccggctccctgaagacccgccatcataataacagtggtcgcctgtcccggctgcagctgaatctcagtcgtctcagatcccatcagacggatcaactcttcatttacaatcttgatcaccatctgtcccggattcagaccattcatcacgtcctgaccgactgcacgctcctgcacatctttcacaaaccctttgacaactttgaagttaacatccgcctctaaaagcgccatcttcacttcccgcagtgcaagcttaacatcctcctcggtcagacgtcccttgcttctcaggttcttaaatacattttgaagtttttcagttaaactgtcaaatgccatactacaactcctctaagatttccgaagaaatccctttaatctctcggatcagctcttctgtactgatcttttcttgctcttctaacaatgtattcatgcggtgaactttttccttaacggaaagaaatctctctacaagatggagcttcgactcatatccctccagtgtcttgttgcaccgtttgatcaaatcgtgtacgccctgcctgctgattcccgcatcttctgcgatttcactcaaagataaatcctccagcacgaactgctcatatatatttttctgatgtgctgtcaaaagctctccataaaaatcatacagcaatgcctgttctaagatctcattcatttttatcacctttggtatcatataacaaaaaaaatgtggtgtcaagtattttttcttgacactgatgattttctgcaaaatcagcaactttcatagcagagaagctcttgcaccgccttctttttttgtgctacaatccagacgaaggacatttacaaacattacttgaaattgatatcttatggaggatttatttttatgaaaatcatcatttccccggcaaagaatatgaaaccggctcaatccgaaacgataccgcgttcgctgcccacttacctttcccatacacaggagatcatcgaggtgctgcgtacctattccccgatggatcttgagattcttatgcggatcaatccatccttggcactggatggcgccgaccggatccagacaatgaaatttgatcagaacggtactgccgccatcgaaacttatgatggaatccagtataaatatatgaaaccactcaccttttctgactctgacaaagagtatgctcaaaagacgatccgcattttaagcggcgcttatggaatattaaagccttacgacagtatttacgaataccgattggaaatgctcacaaaactaaatgttgccggcacgaagaacctttatgaatactggtctgaccttctctatcaggatctcactgcatccgatgaccggatcgtcaatcttgcctctgaggaatatgcaaaatgtatccgaaaatacgtcaaagctccggttcgttttctcacctgctctttcaaagtccggaaaaatggagtgtacaagacactcgccactgccgccaagatggcacgcggtcaaatggttcactatatcatcacaaaccggatttctgattttgaaaaattaaaagagttcgacactgacggctacttctatgagccttccctctcctctgactccgaattcgtctttttacagcgctgattttttacagcgctgtcttattccttcaacaacttctctacattcaacagtccccatccttgttcattctgaggtcttccaatatcaatactgctctcccgaagccgtagtttcacttctacattagacatatccggatattttgataacaaaagcgcgatagcaccactcacgactggcgtggacatggaggttccgctcttcattgtatacggtttctgtcctttttctctgtatcttgcattgcaggatgtgatgtagcttcccggagcaagaagatccggcttcaccacacactccgcagtaggacctctgcccgaataactttttctctttttctttccctcttccatataaaactgatcatcgcaggaaccgaccgtgatcactttcttgctgattcccggcgaggtaatactgcctggacgcggtccataattgcctgctgcagtcactactactattcccacgtcccaaagtgcctccactgcctgcaccagcttttctgccccctcttcattgacactcggcaatgtccccacagaaatatttacaatgcggatttgaaaacgagcccgattttccagcacccactggatcccatgcagaacatttccgatatttccatttcctttctcatccaatactttcacaactaccagctgacacttcggcgccattccctcatatctgcccccggacattcttccactgccgccaatgattgaactaacatgcgtcccatgcgaattgtcatcgtaaagttccgttctgccatgcagcatgtctgcaaacgcaacaattctgtcatcaaaatccggatggcgcacaatcccctcttgtgtcaaataattgcacaaagatcatcgattatttcccctgaatctttcatctcctcttttttattctttcatgttcaacttcttaaagtctgcaataattgataaactccattttatccggaattttatcagcgaactgcctcttcttttccttataaaaccgtttatatatagcttctctcagaatctgtacatcacatcgaaactccgggaattctttctttaactttatagtcacctgatctgcctcttcttttttaacctgtgccaaaaaacagcttctccattttcggtgataattcctattaccgtaaaaggagaaaagagagacttattgactgcaataatatctaaaacaatttttcgcggaacatatacttcctttacgaaaaaccagttttcagaataataaaaatcaaacggatccgatacgtcctccatcacaaatcggttaaacttctctttttctgtcaactacccacgacctaaaggtcatgggcttgtaactgcccagtcgtactaacgacttacgtctccgacctttaaccccaatagatattgctatctaaagtggtcctatggcaaacgaaaggatttaatttatgaaaaaatgcaaatcaacagaatgctaataactaattcaacatctcccatggatacaaaacattgaaaaatcaacacacttcctactaataataaagctgttccctcaattctcgaatgtaactttatgttttttaccccattatatcttttgataaggggtaactttcctttaataatactgaatacacctaaaacacccattatatttcctgcttactaaagctgtgaaaatgctattgttattatttaatttcaatgtttgtcatagttactaactcaagacgaactaaaatagtttgtacgatacgataccaaaacatacatagactcaggagtaaagcatataaaataattgacgcttgtaaatattgtctgccaaagtgaataagaataagcagtggagacattaatattacaaaaaatataatgcttgtaattattttttttatgttttttgtatctgctaaatcaaattcagctccacaagaacatttgtttggtattgttccttttatttgagcactacagttcatgcaatatagtttcttcattctcttcacctctacaacttctaatttttctctacccaccatataaaaatcacttttatcctctctggtagcttataaagaaaaattttatataatcatccctaccagtcctctactataatcgtcgtatcgataacaatatcatcctgaaatcttacttgatataccttccaccctgccaatagattgtcttgaatgcggtattcataatatataatcttttctgtacccggctctgtttttctccatgtcggcgagcctaacaactcctctatttcacatctgcgcatcccagccacgttatacttttcttcaagatcgtcaatataaagatatcttttcgctggattgcagttcagccatccctttggggaaaaacttctttcctgataggatacccatacggtaatcccacccaatatgcacacaaagaaaaaaccgtacacacaaatcagtatgtttctgtgaaaatttttctgcatacacttcatcgtttctcccccccatatgtattatctgttctgctgcatttacttattttctcccggcaactgtaatcccggtatttcactccaaaataaagctttgctatccgcaccgtgttcaagcaaatatcgtacaaattctttttcacacaaatctttttccgttttcattctgtcatatgtattctttaaaattgtactgattcgttcataatctcggaaaaacactttaacaggtattatttgatacttttcccataacagctgattaaaagattgtatggtagaaactttccatgaatatcccgctttgacttcaagatattgccccgtcatataaaatatttttacgggtgtgatatctctattgttgagacttgccgcaacccatgcccttccaataatcgtcatattctttgaaataaattttccatggatacaaaaccaatttttactttccaataaatccagactatttaaaggattttccatactgcctgttattttctgaaacacttctccctcaaacagttcttccaattctttttttgtaaaaatttgattaaaaaccggtacgcaatgatatcttgtaaaaagatagttcttaaccggcagaaaagatttcataagtaccgcaccgtctaaaatgatcacaactattgttttcagatcatgatcttctatcaacccccggaagcctgcatataatatgacaactgcaaataaccataccgatactatgattccctttttaatcggatatagctttttccattctgtcgtccggattatattttttttcataacaatcccctttccccataatcatacatttttactacatcctctttttcaaatattgatataagttttcccgcaaaacaggtcttgctatagcaaccatactggataatgcaatcatgctggctaaaaacagcactaacaaaagaatgaggttcgttatgtaaaaagcgaaacagagaatcgcagagatgaaactccatagatacatgatcgttttttgcgtcttaaaatccttttgccctttctgcagcaattcatcagatagtggatatggcacttctaccccgtcttttttcaaaattctcgtgatattattttcaaaaaacaacaagcaaatgccgccgatactaaggcagaaaaagacaagaaaatatttcaaatagccattttgagccaacagtatataagctttgtcatttaataggtatcccaaatacagcgccgctaaaatacacaattgatattttaaggaaaatgaaaatttactttcttttttatatcgcaatagtttctcttccgctgtgtcataatagaaagctgaatgttcattttctctgcagagctgaatgtacctgtttcgctccctgaatcccatttttgattctctccctcctgataaaatcaatctcactctttccgttcccggaaatatttttttacttgtgaagcttccgaaaattctccgtaatgaaaaaaaatcactccgattatcccacccagtaagagcagaacgattcccgtaagacgagagactcggatcataaaaatcataccgatcaaaaaaatgaccacacctgcaaaaacaattattcctaatactcttctgttccatctcccccgaagatatagattgaacagatctgatttttccatttcaatccccatcgtatgttcctcgatatatcgatacttttctgcaaatgatttttttaccttttgatcaatcaaaaccagaattccaattaccaagatcatcgataaaattcgaacattctcagataagattatttgctttgatacctcttctaaaaatgttgctgccactccgcctgaaatcaaaaggaacaggattcctttcgtattttgctttgcatagtatgcagacagacaaatctgatatactttttgagattgtaagtcaaaataatattcatccgtcttcttatcataaattttataacataatttaatcatccgcttcccccactcttccttccgacagtatcatcgataaacgatcggttttctatatgctcttcaaactctttatacaaaaatactcagcacatacagcagaatgaaaagtattgcgagacacactcccgcaaacacaactattgtagttttgactagatgcttttctttgattgtcaggatcatcatggaaaatacatcaaaagaaaaaagaaactggcagatgccggacagaattaccactgcctttgaatgccttccttctttacatgattttataaggtaggcgattgcatatggcgccgctcccaacaaaatcccatacccaaaaatcaggaaaacaactgtgaccagcccaaacaacaccatcaacggcagcggaaacagtgcagcaagtgtcacgctgatggtaatacatcctccaatcaaatagaatggaatcaatccatatttaatgatcaatgtacaatttaacaatgtttttcttgaccattttcttcctaccgtcaatacaacgatcaaattgacgactcccatgagaaaaggcagaagtgctgaaataatctgtaattccactacctgatcaaataagccgggcaaaagaaaaaatgtataagagacgatcacatataaaattggaatcaaatatggcattctcctactctcctttcaagattttacctgcaattttccagccttttagcggatgatttcccacgaaaccagttatcagtaaaatcgttatcatacacatgactgagttaaaaaaagcatataccagaacggatggcacaatccaaaccatcaaaaatcggtatcccacacatactcctataaaaatagcaattaataccatatgttgaaaaaagcttttccggttctgctttgccaatttccgtttttcttccagtctgcaaggatacactcttgcgttttcttccacttttctttttgcacgtcttaacagatatccagaaacgatcgcccccacaatcactcccagtcccaacgaaatccagtacaacaaatttttgtcaaaaggaattggtttttctatgttccgtacaagcgcatagattatcaaggaaattcccgaaagaactccaaccacaagtccgttccccccttttttattatcaaatacaaaaaattcctccgtctgctcatcataataataactgctccatgtgttcgcttcgctgcagatccatatgtatttcatcaaactcacatccttttctgattacttttcttccattcattttccctcttctgtccattttcaattgctttcctgcgaaacagtgattttttccaagatccaccacgtcacaacagatatcaaaaaggaaaacgaaaaatctcctaataccatatacggaatcctgatcaaaatacgattcatgaaaccaaatactaccgttgcagctattacaactgccaattcattctttcgttgatcttccatacgatttcctccttcataattccatcactctttttctggaaacatttccaaattcttttgtacaaattttataataagattatatattaccaatcaattcttgtatatatttttttgcatgtagagaataaaaattttaggcggggacatagaaacgcagtctgatccgcgaccagactgcctcactcattgattccaatataaattttcagtatcttccgcttcccggaagttttttcttttaatccatctatataaaatctttcttttccactccgatcacagatagaacagcaaacagaagggaaatgatcgtcaaaacaagagggaatacggcattatttgccagtgtaagatctccaatgtttgcctgcgtcaaaataatcagcagaaaagaggatataatcgtcgcttttgtggactttattgccaatccgataaataatgcaataaaactcatgctaacaatagaaatcgattttacaataagctgtacataaaatttcagacttgccatatcataatcaattggaaatgatgataccataaactgggacccccacaaaatacagccataaattacaagttttgttattaccaatgccaggaaacagaaaatccaaaccgagagcatttgagaaataagtattttctgccgcttaatcgggtaagagaacatcaatgccattgttttatctttataggcacttacaataaaagatgaaagcatcacaccggtaaatactagaaatgacatactgcaaaataattcaataggtgctgaaattgtaccgtttcccggcgctgcgtccggaatccctgtatccggatcatttgcaataccaagataggccagtgcaaacagaaacagacaaagaacacccgccaatatcattgcatttctaatatactttccaatattgtttttcctccattctaattgaatcagctttaacataatctattcacctccgcagttaatttaaggaagtaatcttctaaagtttcagcttgtctgccaagcgcaaccacttcaacatcattcaatgctaacaccttagacaattcctttattgaaacgtgctggtcataaatacggatcgtattgttttcaatgatcttaaaattgttataccccagtttttcactcaatacataggcagcttttttaggatctgctactaccagttccacatatgcaaggctcatcctctctatttctttcatgccaatttctttcaccatcattccgtgatgaatgatacctaccgtatcagcaatactttcaacttctgaaaggatatggctggaaatcataatcgttgttccatattcttcgcaaagattttttagcaaatcacggattttcttcatacctgcaggatccagtccatttgtcggctcatcaagaattaataattctggcttgcaaagaattgcacgtgcgataccaagtcgttctttcataccaagagaataattttttacagctttttgtgaggcagccgataattccagcagatcaagcgcattttcaatgcttccatgtttataataccccatgtactcacaatgaagctgcaaattttcatacccggtcatgtgattataaaaggtaggaaattcaatgatacttcctattctttttaagatttcacaggactgtggagtaagtatttctccgaaaatttcaatacttccacttgtcggcttccaaagatttgtgagcatttttataacagtagttttacctgcaccgttcgggccaaggaaaccatagatttcccctttctttacgtggagattgacattcttaacaatctctttcccatcaatgatttttgcaaggctatttgtttgtacaacatatgacatattctattgcctcctttctaaattccattgtaacggctcagattttcaaaactcttgaataaatattacaaatttctttcgaacatcttaaagtaagattttttcaactgtattgtaaaagtcgttttgacataaggaatactttccaaagtaatatccccaccaagacaaacagctagatttttggcgatggtcagaccaagtccgttcccttgtatcttacgattacgagagtcttccattgtaaataatctatcaaatatgctgtctgcaaacatttgatcaatgccttttcccttatctgttacctccacatatacgtttctttcttcatttttcaatgaaagcccaagatattttccgtccgccccgtatcggatgacattagaaatcaaattaaacagaatacgttgtaaagcttctttattcccttgcacaaaaacaggcatttccggaatatcaatatttacttgaaagtttttactagaaagcaactcataaaaatccagtacactttctcgacaaatttcgcaaatatctaccttcgaaagcgctatatccatatcgcctgactcaatttttgatagggtaaaaaattgatcgatcattcccatgaccccttgcgctttatcctctacctttttcagcatttcagcagaaattttttcgcttaactgcatgatttccagataccccaaaataacagtcataggcgttttaatatcgtgagaaatattcgacaacatttttttagaggctatttgagaatggcgataatccgcttttattttcaagtgtttctccagtaattcattgatttgtgcagccaattctattagctctttattgtccgtaaaaaccattacttgctcatcactgtgcgtttctatgatttttttgagcttatcactgatttcccgtaattttgcttgtgttcctgtgcggaaagtaaattgctgataaaatacaacacataccaaaaaaacgatacaaatgcacagaaaaaaaataatcgttgtatccttcatacattttcccccaatttgtatccaatcccccatacggtgatgatataccggggattgcgagtatcttcttcgattttatttctaagacgacttatgtgcacattcacagcattttcatcaccaagataagcatccttccaaacaagagcatatatttgttcctttgtataaacctttttcggatgttgcataagcagcttcaaaatttcgtattcttttgcagtgagttccacccgtcttccgctctttgtcaatgtataatctgacaggttcattactaattctccggcagttaatcgtttcggaatatcctctgatccttgatcatattgatttctcctgcgaatatttgccttaatgcgagctaacacctccacaacagagaacggctttgtaatataatcatcagctcctaaactcagccctaatgttttatcgatttcgctatcctttgcagagataataatcagtggaacaacactatgttctctaatatgctgcataacatccattccactgattttaggtatcatcagatcaagaagaatcatactaaagtctgtgcaatcaaaatagtcacatgcctcttgtccgtcgtatgcacaaatcacctcataattttctacggttaaatagttttttaacatttcgctgatttctttatcatcttctatcaataaaattttattctgattcatagattcgctgactcccttttgtaataaaaattttgcttatattatacactatatacgcccgcaccgacaaacacaagaaatagtccttaggtagctttcccatcactgaaattccagataatctccacatgccgctcatcccacacttttacctttcttatgaaactatccacggtttcctggttcagctcatggaccttacatgctttccaaatcttatcggcatccggcaagcctgtatgcttctctgcctccatctctaccaaaagcatcttctgcctttgaatttcactttttatcgcatcttccttcttctgtaccttttctttgcatgccagatattcttctttcaaaatttccttctttttatatcgctcataaagtatgatctgctcttttcctgtaatctccaaattttttcgggcttttcgcagcttagccatctttgcatcgtactgtcttttctgtacctcctgatacagcttccacacttctttcagttcaatctgcctgcagatttctttttgcacagcggatacaagcatctgctctaaaagaaatatgttcacttttttcaaacagttctcattgccggtcgtataacgatccttgcaataaaaataaggatgtttcgcattccgatagcacaaagccctgccacactctccgcatagtacctttcctgtcaacatgtgtgcctttcgtggctgataaggttttgatattcctctcgtccgctgtacttcctcaaaaatctcccgttcaatgatcggttcatgatgatgataggtaatcttccactcactttttggttttaagtgattttttcctccgacagcatccttttcatatttcccatatacgacatctccggcataaaaatcatttcgcagtatcttgcaaatggtcgtatgatgccatgaaaattccttccccaaagggttccgatgtgttactcctctcgccgccagatattccaccggtgtttttatcttttccttgtgaaacttctttgcaatatccacagaagaataaccctctaacgtcaatcggaaaatttcccggattactttcgcctcttctggcacaatctctacttgattcttatcatctgctttcttacgatatccaaacggacagtttgcactgcaatagattccccgctcttttttagaatgcagagaagaaattacttttcctgataaatccttcgaatagagatcgttcaccagcgctttaaatgccagatccatacctatcatttgattctgaacaactctactgtcataatgatcattcacagaaataaaacggatgcccaaaaacggaaagagctgttcgacatagaaacccatttctacatagtctctggaaaagcgggaaaaatcctttacgataacacaatctaccttcttctgccggacacatcttagtaattcctgcatggcaggtctgttcatgctagttccgctgtaaccatcatctacaaactcgaaaatctcacacccatacgggcatcccgtaatacatgccttcggctggcagacttcgtctgataaaatttcccctctaaaattttgctcaatatattcttttagcaataaacgttgacaagaaatactgttactttcctgggtattccggtcatcttccttggacaatcgcagatacattgcgatgttcatcctattttgcatcgcttattcctcctgagacttttacaaatttttaaagtttttttctttcccatgaccttcgggcaagaaatatctcacgctttctattccatccatatatccttccatttccagagaacctcgatccgttttccaggatacacatagattttccctatcaggttttgtaccagttccgcattcaacacagcgccaccttgacatttcaaaaccgtgcagagagcttgattctgcttatctaccagtctgtcaaccgaagcatattttagagataactcccgcaaaagccgctgattttgttcctttttttcttccagtttctttttgatttccagaaattgagtctgtgaagtgctcccgcttcgatactccatataacaaaaactgatcttcctatctatgttctctaccgatttttgcagctctttttgtgttttctctatctgtcctttttgtatttctccaacctctcgattaaaatctgtaagttttttcatctgtatatcactgagaagaaactcttttttcaacagatgcaatatcactttctgaagctgaagaactgtaatcgattcatttttacatttgtcttcatcaatgcgttttctattcgggcatccataagaaacaaaagtcctctttttgttattagaagactctctttctgtcaccgtccggctaaatttatgtccacattctccgcaatacaaaatgtcccggaacacctcttccatcgtattattccgaagtgatctggacttttggatcttacggtttccctccagcctttctcctacacgacaaaagacttcttccggaacaagaggttcatggacatgttctgctatgatcggttctcttatatgcttgccggattgcgcaagatttcctatgtaaacgacattactcaacaaataccggatagcttctctcctccactgcctcagtttctgcccctcctgctggtaaacagttttgtatgctttgtaatcgcccgggcagtgaatcttttgctcatacagccactttacaatagaaacaacgttttccccggaatcataacgcacaaaaatctctcgaacgatctcactggtcaaagattcacgcaccaacgtccgtctcccatccattttttcgattcgaaaaccatacggcggaacactgcctagatattctccctgcttcctctttgtctgcttgctggcttttaccttttctgcaacgtcccttgcatatagttcgttggctatatttttcaaatgcatggaaagcgcttcattacaatctccttgttttgcgctgtcatactgatctgtaatagaaataaaccggacacccatgaaaggaaacatcttttccacaaagtttcccacctcaatatagtttcttccgaatctcgaaaaatcttttacgatcacacagtttatcttttcctctctcacatcctgcatcaatcgctcaaaatcactccgccaaaaattcgttcccgtagcccctagatccgaataacagtcatacaatagaatatccttatgagtctctataaacgtcttccccatctcaatctgcgtttcaatagacacttcgtcgccatcctgataatctacagacagccttgcataaacgcctgccacatatgctttctctgttttcttttcaaaaagttcctgactttccagccgtcttttgcgttttgatgttcttgccactgagatcacctcctgattacgagcctgccattcttcttatctcttcctgatacccaaattgtatcacaatccgtttctcctcataaacttctatccgctccacaaacgccagcagtgcctccctgtctaacgtcgtaatatgcatcgtctcttttagccgctccaacctgacattagagtgcactcccttgtaaaacaatttctttaccagttcctcctgctttgcaatcgcccatcccgtttctagatactgtttttcataaattgcgctaaatttttgaaaatctgcctgcgtgatcactcctgctttccagtcttcataaagccctgcgcgaagtttctgatagttctcttgctcaccgcgcagacgtatcatctcctgctcaaatccaacaacatcttccaaatgcatttcccttgtccgaagatactgcatctgtctgttttcatcgatcagaagtgctgcttgcagccggatgatctgaagtatgactctttttaaatccgcttccaaaatacggtgtctgctgcaaccttcgctccgatttctcgtggaacagatataagatattttttctgttcccttgtatctgttcatacgtcggaccatcggctctttacagtctccgcaaaacagaatccccgaaaacatatgcgctttttcttttcctttctcggctctggtatctacttccaaaagtcgctgcaccttttggtaatccactttggaaacgatcgcttcatgagttccctctactttacaccattccgactccggcttttctaaaatctttttaaccttataattgactttctctcgttttccctgcaccatcgttccggtataaatttcattggtcaaaattcgcttgattgctaccgcagaccatttggatacgattcctgcctgaaaccctgtggcataatgttcgccatgggatttcttatattccagcggggagaaaattccattttcattcagtttgttcgcaatggcaagattgctcattccatccagtttccacgcaaaaatctttttcacaatttctgccgcataggtatctataacaagcttatttttatcctctcgatctttctgatatccatagactgcaaacgccccgataaatttcccctgctcccgttttattttctgatgtgattttaccttttctgaaatatcctgacagtagaaatcattcacaaaattctttaccggtattacaaaagatgttgtattcttatctgcagtcagactatcgtaatgatccgtaatcgcaataaaacgcacagaaaaagccgggaaggtcttttgaatgaaccgcccggcttcaatataatctcgtccaaatctagataaatcttttacaacaacacaatttaccttcccatttttaatgtcttctatcattcttttaaaatccggtcgatcaaaattcgcccctgaatacccatcatcaatataaagatcaaacaactccatatccggctgttctcttacaaacgaacaagcaagggcacgctgagaggaaatactgtcactttctcgttttgcaccgcaattcatatctccatcctccctcgataagcgaagataaatcgccgtatgataacatacatttttttgcatcttgcttccttctgccttttaatattttgtttctgcaatttttgaaatatactgtttcaaccggtcattcaaagtctctgtacagtcggaatatccaacttttacaatatattctcccacccgtacaagataagggttatgtacctgttccacatacccctttactcttctttgtaccgactgtttcgtgtaaatttcaatttcactaatatctaccaattcatcagtatttacattttttatatcgacctgctgcatttctcgcaaactcttttcctccaagtgatagcccccctttctacttgagattgtatgcacctggggacttgtctcatgctaaaaaatattcctcatttcaagtattttgaagtatatcgaaaactcattttaccacgaatttaccacgattaaatgagccttgatatgatgctaaaacagcgctaaaaagcagtcaatcactaagaccaactgctttttgtgtatggatattaaattttgttagaatctatcagtatcctaaatcttaaatactaatatggctttatctgttccgaccatagacatagttactaatttatatcctttgttcagcatttcctctgattttttctcaatagcttttgctaaatcttctacaccagtagaacattctacaacaattgatttatagaccaaattgaacattttatccacctcctccttatttgattttagagcaaatagaatttattattgtttcttttcttcttttttattctttctatcccaccaagtatctgctaacgaacaacttccgcccataactataaatccaatcataataagccaaaattccatgatttttccctttttaatttgttaaatactgacaaataaaaattacaacaaaacatataataagtgcgattgcacctgcaatgaatgcaaatatgattttttgataatttctttttcctatttcttgttgtgtttcatcatgtgttaattgctttccgtcaataaatgccaaaatttctttataggtttgaatgtcatatctctttttcaatttttcaatcttacttgctgtatagagcgttattgcgaataagcaaaaccagatagcaattcctatatttcccttaatactaaataaaggataggcacttacggctataacgattaattcaattaggaaaactacacttatcacattaaactttttaattgttgttttttctacaatctccctcatctcctttatatcttcttttataaaattatctaaagatacattgaagatattagataaactaattaaacttttaacatctggacaacttttatttgtttcccaattagaaattgtttgtcttgaaacaaatattttaagagccagctcttcttgagaaattttttgttgttccctaaatttcttaatttgtaatccaatatccatcttgaatcttctcctttattgtatatgaatataagtattttgtctgtcaaaagcttttgacattgcccttttttccttgtcaaaatagttttacatggtttaaaataaaacttttcaactaattatactcggtttcatatataagttacaagaaaaatatggtcttacatttattttttcggttgtccctgcggtgcatgtttctgtctattgcctgcgttttagttgcctttattctccaacacaatatcctctgccttcgcatatcaatttatgtactgtatttataatcaagtttttaatgttctttcaacaggattgaaatactccaattcaggtattccattcctttatctcctcttaattatccaacacagaaaataagaagctacactcggcagccccttatctacttttgatatataattttccggacagcatataaagacagattacatttctttgtaagacactgcatagagattccactatgatactcctgctttctctgctgattacgttgttgttttactttgcgactactttgctccatacaactgtcgcacgctactggctttgcatgaagcgaatctttgttactctttttccccttaatgaatatacagctcacctcttttcgctggtgagctttgcaatataataacacattccccagtatcaagcaccgcaacacaaattccctgcccggatatgtttccactatttatatcctcacatgagtaacgaatggctttttttacatctttcatatgcatatccctttttcattaggatattcatttctttaacggatagtgtgtaaattttctgcacagacgtttctctcttcctgttccgcttatttatgatctacaaaaataaactgcagaaagcgaatgaaggtataaatcataaacaatacggcaatcaccgtttctatcagaacaacatatcggagcatcggtatcggctgcttcatattcgcaagacagaccattgtctgctttgttgcaatcgcgctgataacaaatgggaaggtaaatgccgcatagcttggatagaatttcagcttcagataactgatcgctttcacaagcgccaaaacatatagcacggttgccacaagcagcatcgccaacaaaaattctcttgattttggtgttactgactgtacatatccggcaacacaaaggcttgtaggcgctgcataaatacagaaaagcggctttgcaggttctggaatctctttgtatttcatataacggattgtcacaagaactaataaaccgattaacgtcaaaaatccaaaccagaatgcaccggcacctattgcaagctcttcaaaagctggagccgtaactgccgcaactgcaattcccacatatacaataaaataactggcaaatactttcggcatctgaagtttaagcaaaaactttattgtgaaataaacaatcaatataatatgtaacccaatcgcaaaataccagatgtattttgctcccacaccaataaatggcttgatatacgtgcttaataacatcagtgccatcggaaatgtcgcagccacactcgccaaaatcggatttttaaaatcttcttttatcatctccggaaacattatgagtttcatcagaacaagtatcagtaaaaatgtagctattcctccacagacatatcgaattccctcaccataactctgcaaaagattgccgagagcggcgaatccaagcataaccccacaaagaggaattggaactttttgtatcatttttttcatgtcattctcaccttttgtcttaaatttcagcaaccgtacgtcttggagccggttcatccacctcatctagattcttcattcccaattcacggcaaatcatttgggcaaccttccatgcacaaagtcccgtaaagaaaatgcattgttccttgtgttccccacgtcctttgtcaaactcttttgtcagaacgcgacagcagattgcatttttaccattggcctttttaaaccagtcatgaagctcttttgtcagttccatacatttgacactttttggatttgtcggtccatcctgctctgtgcgcccaaaaaatagtccaagtgcaagaattcctccattaaaagcaccacagacacacccggattttcctgcgccgactgccataccagaagccattgcaatcacttcctctggaacatccagcttaaattcatcgcggattgcactgactaaagcctcacagcaatagtatccttctttaaattttttctcagccacttgctgcacagttcttgggctaatttcagttactccaattttcatatagatttcctcctcaaatataaattttgctgcttttagtttaacatatctgaacagaatatcgttatcatttatttttatataactataggcatattttataaacaatctaaaatgcaaccaacattccctctgtttttactaaaatcttcctttttaaattttttctgttttttgggaaacatgaataagccctcccacatagtataggagtgtaaacaatctcaaatggaggatttaacatgagtgatttaacagctactaactgtggatgtggatgcggtggagaagacagatgcggaaataacaattcttgtctgtggatcatcctcttattattctgctgtggcggtttcggaaacggacacgacaacggatgcggatgtggtgacagctgtatctggatcatcttattacttctctgctgcggcggatttggtaatggatgcggatgtggcgatagaaattctctttgctgctaatctcttctgcaaggcggggcaacatgccccgtctttcttttggaaaaaactcgactgccttgctccattctttctcacaaaatcatttttctaaacatgcttagatgtcttccttgtcattttcttctgcgtttgctctctcctcctgttgtttcctctgtgcttccatcttcctttgaaaacattcttcatctaattcatatactgcatttctgtcaatgattaaaatttgttccatcttttcctcatttccatttctcttttctttattatatgaaggaaaaagaaaaaggtatatctttctcaatctgctcatatatattgataacgcaatggaaaggagtttctatggacgatcaatcaaaaattcccatgacaccatttgacacactgatctcgacacccggtctgcggatgatgaaactgatgattccctatcttcccccatccaaccagcggatgctcgcagtctatgtgaagtttatggaattacaacagacgttttctttttttcagaattttcgctcagatttacatagctgtgcttttgaaaaggaagtgtcttcgccatctgacattctggaagaacttcgcccattcctgagaaagagcgactgtgaaatgatcgaccagatacagaatatgctaagcgcaatggaaatcgctgcctcatttcagaacatgacaaaggaatcctcctcaaaacaatcttgttccgatgcctcatctgacagctcatcttccactcccgcatttgacctttccatgttgcttcaaggaatgctttccccggagcaacagaacctttttgaaacttacagagatctgtcatccgatgtttctgctgccgatacagacgcaaatatgcaggaacttccgatatctctggaacctaattctttggagggaattgtatatgaacaactggatggaacacccaatgttacagaagatggacccagcaaaactggaactgatccggactgcagccacaaaaacgaacgggaaatccggcaatgaccttgccccgatcctccttgccctgatcacaaacgcaaataagaaaggcatccgtttctcgcctgatgaaatttcattgattttggaacttttaaaagaaggaaaatcaaaagaagagcagatgcaaattgataaaaccgtccgaatggccagttcacttttgaaaaatagaaaataaattgcttgtattaagtaaaagaggtactttttaacatggcacaaatatttatctgccacaaaaagtacctctttactcctgcttaatctctcttactcatccatgcttcaatgtcttctgtcgtctttaggattcctttggaaagatctaccgctttcccttctgtgatcagaatatcattctcaatgcggattccaatctcttcttcctcaatataaaatcctggctctaccgtgatgaccattcctggttccagtacctcataatcagaacaactgatatcatgtgtgtctaaccccagttgatgggaaactccatgataatagtaatctgctactgtctttccatcttttgcaagtccaagttcatcaagtcttgctgcgtagtgatcgatcaccatctgatttaattcccgaagtgtcatacccggcgctgctttttcaataatcaaatcttgtgcggataataccaaatcataaatctctttctgacgtgcagtaaattttccattgactgggaatgttcttgagatatctgcacaataatgctcatttgcacttccaagatcgatcaaaacgagttctccgtccttgacttcttggttattctctttgtaatgcaatgtcgtcgctcttacgcctcccgcaacaatacttggaaatgcatgttccctcacaccttgtttgcgcagcgcaaaatcaaacgctccctccatctcacattcgttcatacccggttttacataccgcatcaattcttcgatcgccttctgtgttgtatgctgtgcaaccatcattttttcaatttcaatatcttcttttttgatacgctgtcctacaaactctgcgtagatatctctgatttccactgccggatactgttccttaatgcgtgctgccaaaagatgtgcctgtgtcggagcctgggtcactttatatttccacaaatccagcgcaactgtgagttttttgctgcctctggatgattctatcagactgttgaaatttccgtcaaatgcttccaggtagcagattttctcaatcccactgatctctcttgcctcgttttcacgcattcttgcaccgacccatttcgccatcacctcatcaaatggctcaatatatagttcctccgccatagttccttcttttagcttcttcagcacaagaatcatatgttctctatcaattcctgtataataataaaaattccgatcaaccgaaaattcgtattcttcatcggcagaacgcatcggcgctgttcctgaatagataactgcgattgatggtgctttcattccttccattaactttgctcttcttgctgcatagacttctctcatgattttttctcctactaatttgttatttttagctctccatcatttctgtctgcaatccgcaggcacacgcaaggtctctgtaatattctctgacatcctcattttcacagaacagtggaaatgccatctgataattcccccagagcaccgccctgttctttacaaaataaaaagaggaaaacagccactccctcgctgtaatatcgagcaggaaggtacaaatttcattgtccagcggatagtatatctttccctccgtacattccatgcgctgtacatatgatttttcgtccgcagaaagcccggagagaaagtgctctttttcttccttttttaaagaaggatagtaaaaatcggcatagcagtcctgctcctctatcacctgcaaaagaaattttttcattttttctttcgtacccctaagcagaatggatggataaagaacttctccttctttcagtgtatctatcaaaagtgctcctgccttttccacttctgctttggtcatagaatgaatcacagtattctcccctttccatgaaatttgtatctcaaaactgcttttattatagcacaatctttgttatactaaaactacttttcaaaccataaaaataatatttacgaaaagaaaggattacttatgagaaatatattgctgacattagaatacgatggcagccgctatcagggatggcagcgcctcggaaaaggagaatctacaaacaccgtttccaataagatattagaagtgcttaaaaagatgaccaatgaggatgtagaattattctgcggagcccgcacagaagtcggagtccatgcttatggacaggttgtcaattttaaaacaacaacagatatgaccttattagagatcaaacattacatgaatcgctatcttccgatggatatcgcagtactctccgtggaagaaaaaccggagcgttttcatgcaagcctcaatgcaaaaagccggatttatctataccgtgttgctattgcagaagtcccaagcgtgttcgaccgcaaatatacatatcattctttcaaaaaaccagacacagaactgatgaaacaggcagcacttctgcttgcaggaaaacatgatttcaagaagttttcgaccgtaaagaaaaacaaatctacagaaaaagaaatcttgaatattgatatttacgaagatttggaagagattcagattacactggaggcaactgattttctccacaatatgcctcgcatgattctctccaccctgctcgatatcggacttggcatccgccgcaaggaagaaattgacgagattttgtctcctacttcctctactgtggcaagcgcaccttgcgatccgaaagggctctatctgcaggaagttgtctacgatcgttaaaacaacttggaaaagtatcttgtacagtgattttgtgcacctatttcttgaataaaagcacgatctctgtattcacttattatcacaggaaaggagcctcttttttatgaaattattatcaatcggaaaatcagacttaaaaacaccttacatcggcatgggaacatgggccatcggcggtggtgtatggtggggggaaaatgatgatgtgctctccatccacactgtccatgaagcgctggatcatggaatcacatggatcgacaccgctccggtatatggggttggtcacagcgaagaggttgtcggaaaagcattgaaggacagacgtcatagtgcaattctctcaacaaaatgtgggctggaatggagacacgagaccccatgtttccacaaaatcatcgaagggaaacatatttaccgagatctgtctgccaaaagtatccgtcaggacgtagaagaaagcttaagacgtcttcagactgattatattgatcttttatacacacactggcagacaccggatctttctcttttcccactcgaagagacgatggacactctgatggcattgaaaaaagaaggcaaaattcgtgcgatcggagcctccaatgtcacaccggaacagcttgaactttactgccagtacggacaactcgatgtgatccaggaaaaatatagtctgcttgaccagcggatccgcacagatcttcttccgacatgccagaagcaccaagtatctatccaggcatactccccgttggaacaagggcttttgactggaaaagtaactatggataccgttctctctgatacagatgtccgcaacaacaatcgtttctggaaaagcggccgccgcaaggaagcccttgctatgttagactcctggaaaccaatgttggaaaaatataactgttcttacagcagtcttgtgatcgcactgactgccgctacgatcccggatcttcatattctctgcggagccagaaaacctgaacaactcatcgataatgcaagcgcactttcgctaaagctggatgccgaggatatcagacagatgcttgctgcagttcctgctcaaatctaaaacaggagggagaacaaacttggaacagatcagacaaaattattatggcaatttatgtacggaaatgtatgaaatcctacacagcgaagcgccgtcagacgaactggacttttatctgtcttatgcagaaaaagggaaaaagatactggaaccactctgtggcagcgggcgttttcttgtccctttcctggaacgtggttttacaattagcggaatcgatttatcagaggaaatgcttgcgaaattaaagcagaaagcgccaatggcttctgtcgcctgcagagatatccttcagtattcttctgatagactttttgattacatcttcatatcctccagctctgtatcacttttcactgatatttctgtatgcagacagcttcttgaaaaaatgaaatcactgctgtccccagacggtgtctttgtctttgcagtagatacaaccgcaaatagatgtatcgatgacacagagtatattccttctgtcactgtccctttcgaagacggtactgcattgaccttgaaaacaaaaaactactatgaagagaaaagtcagacacagttttctccgggcatctatgagttatgccggaacgatgaattgctatcacaagaatttatggattttcagacacatctctatacctttggggaaatggaaggatacctaaaagaagccggattttcgacgatcaaaacttactcttcctttcaaaaagaaattgcggtagacgatcagtgtaaattttttctgtttgaatgcagaatttcttagataaaaatgtgaatagcttctcgccagcaaacctgtatggagaggatgcaaaacagggttgtcttaaaatatgttctcctattcggaaaccatttcaaggcaaccctgttctgcaattttctattcttctttctgcaaatattccagcaggttgtgatactgctttttcatataattataaccatgattataaaagtctgttaaagtatctgcattccgctccaaccttgacacggtcttcatctgcggtctgagcacaaaaatctttccttcctcttccagcttctctatcttctccattgtacggttatagacaatgctgcgccttgcgatcgtacgaagcaaatttggatatgtcttataagacgaacgataaatcttcatcacgcctttggacggcatctttttccgatatccgggatttcttgtcagaatcacaacaattttctcattcccaatctcaagtgcccgttcgatcggaacagaatctgcaagccctccatccagatacggtgtcccatcaatattcacgatcggtgaaaacaacggaagactgctggaagcccggcagatcttcatcaggcgctttgggtcggacttttctgtcatatattccgccttcccagtcacacagtttgtcgtgaccatctcacatacgatgcctgactgaaaataggtgtcgaaatcaaacggataaacttcatttggaaatttttcaaagatcatatccatatcaatcaggcttctctctcggacaaatttccgaagattaatgtaatcgtactctttctctgtatgaatcatgcaattctttgttcggccaatttgttttgacacataatctaccccgttacatgctcctgctgacactcctatcacatgtgacatatataacttctgttccatcagaaagtcaagtgctcctgaagtaaacacacctcttgttgcaccgccttccaaaaccagtgttgctttttccatatgcattcctcgctttgctttttttaaattatataccctttttcattcctttcaaacaatttttttcttaattttctccaaagatatgctttgccttgccatttttaccttctcatggtaagatagggcttggaaatatccgtaaacaagccagtttctgcagaggaatctcacctgtggatctctggcagaaaataaatgaaacagacaaaggagatttatcagatgattagtgcaaataatatcacattacgccttggcaaaaaagcgctgtttgaagatgtcaacatcaaattcacagccggcaactgttatggtatgatcggtgcaaacggagctggaaagtccactttcctaaagattctttccggtcagttagagccaacaaaaggagaagttgttatcactccgggagaacgtctttctttccttcagcaggatcactttaagtacgatgaatttctcgtactcgatacggttatcatgggaaacgcaagactctatgagatcatgaaagaaaaagaagtcctctacgcaaaagaagacttcaccgatgaagatgggatcaaagcaagtgaactggaaggtgaatttgctactatgaacggatgggaagcagaatctgatgctgctactctcttaaatggtctcggcatcgacactgatctgcattacaaatacatgagagatctgaaaggttctgaaaaagtgaaagtccttctcgcacaggcactttttggtaatccggacatcctccttctcgacgagcctaccaaccacttagatcttgatgcgatcgcatggctcgaagaatttttgatcaactttgacaatactgtcatcgtcgtatcacatgaccgttacttcttgaataaagtctgtacacaaattgcagatatcgactacggtaagatccagctctatgccggaaactacgacttctggtatgaatccagccagttgctgatccgccagatgaaagaagctaacaaaaagaaagaagaaaagatcaaagaacttcaggaatttatttcccggttcagcgccaacgcttccaaatcaaagcaggcaacatcccgtaagaaagcactcgaaaaaatccagctggacgacatccgtccatccagccgtaaatatccttacatcgatttccgtccaaaccgtgagattggaaacgaggtacttactgtagagaacctttccaagacaatcgatggtgtaaaaattttagacagtctctctttcacgatcacacgcgaagagaaagttgctttcgtaggtggaaacgagcttgcaaagactgtgctctttaaaattcttaccggggagatggagccggatgaaggaacttataaatggggagtcactacttctcaggcatatttcccgaaagacagtacaaaagaatttgacaatgactatacgatcgtagactggctgacacagtattccgaaaacaaagatgcaacttatgtccgcggattccttggacgtatgctctttgccggggaagacggagtgaaaaaagtacgcgtactctccggtggagaaaaggtgcgctgcctgttgtcaaaaatgatgatctccggtgcaaatatcctgattttagatgaacctacggaccatcttgacatggaatccatcacagctttaaacaacggtctgattaagttccctggagtcctcttatttgcttcccgcgaccaccagatcgtacagacaacagcaaaccgtatcatggagattgttcctggcggaaagctgatcgacaaaatcacaacttatgatgaatatctggaaagtgatgagatggcaagaaaacgtcagacatacagcatggatgccgcagaagaagacaattaatcaatcgtggatccacattgagaaaacataaggaaatcccgcagagtccaatcgaaactctgcgggatttttttatttatgtgtattaatctcaaatactgctttatctgtcaacatgtaatgtttattacatagaataggttgtaactcctcatcgtatattttttcctggaccattgtcatttgctccccttctttcatatactctgtaagaatagaagttccagctgaatttggatgaatcctcagctgcgaacgctctgctttctcatagatttctgtctgagcaaatctaacaacctcttcttttttatttaaatctaactgatattttgtgactgtatgaggtgacattactccaaaggtataaccggttagctccgttcctttccagtaccaaatatgaattgctacaattacaggggtatctaaattcaacaattctttttcatagtcattagacggttctattttcaactcaaatgttgttcgatcaaattcttctcccatgcatccggccataggatgcgtcagcttctccagactggaagaaactattttattcccatctgcaacaaaattccctgctccccgaacttttcttaatttgccatcgtcatgaagaagatccagagcctgcctaagcgtcattctactgactcccagcatttttgccagtttcggttctgcgggtaatctgcttccaaccggaaatgttccatcctctaccattttataaagtgcttcatatacttgtacatgggccaattttttgtgtgtaacttctttctttccctgtaattccattcttttccctcatctttctaactctgctctttccaaatattttaccacttattcttcaatatttccagcagcctgaggtccttttacctttcgtccaaagaaaagaagcacaaatagcgtaataaaatatggaagcatcaacatcaattgatttggaatttccactttcaaactaattctcaatgcctgtgcaaatgcaaatacaaggcttgcgcacagagccccaaaaggattccacccaccgagaatcattgcggccaatgccatgaatccccggccggcaaccatttcttttacaaataagttgctttgcacgatggaaagataaccacctgcaagcccgcacaacattccacaaaaagtaacagctacatagcgatataatgacacattgatccctactgtctgagctgcctgcggatggtctccaatggcacgaagcctgagtcctgcctttgtccgatacataaaaaaccaagctccgagcacaataccagcagtgataaaaagatatggggactgttctgtaaacaatgttccgattactggaagctcttttagtcccggaatactgactgctggaagtttttccacttgtccactcattccatctgatttccagactgcccgggtaagaacaatcgtaagtccggaaacaaatacgttgatcccgattccgctgacggattgatttgtcttaaagcgaatacatagtactgcatgcaatataccaaacaatccgcctaccaaaatagcaaataagaccccaatccatggattcccactgatataagttccatacactgctccaaatgctcctgaaagcatcattccttcaattcctaaattaataatcccacttcgttcacacagtgtgcccccgacagaagctaacaccagcggaatggccatacgcaatgtactcaaaagcatttccatcgataagatactatccatattacgattctcctttcttccgtttgatcaatctgatgatattcggagttgccacgaataaaatcaccagcccctgaattacatttaccatacttgtggaaatccctgctgaataactcattttcatagatcccgcttccaagatcccaaataaaagcgcgcttaaaagaattcccatcggatggttgttagccaataccgctactgcaatcccggtaaatccaaaccctggagaaaatccgtcaataaatcttcccattttcccaaaaacttctgttgtacctgcaagcccggcaagtgcgccgctgattcccatcgtcaaaatagccgttgtcatcatcgggattcccgctgcctgcgctgctgacttattctctcccactgcccggatatgatacccttctcttgtcttcttaaaaaagaaaaacaaaagaatcgctgctgcaaccgctactaacaatgctgtcgtcaattgcgtcttcggaatcagtttcgtcaacatataattcgcaccaatatccactgtctgcgctgtcatggcaccttcctgcttcaatggatatgtaacaatatacgaagtaaaatattgaatgatataattcaacataattgccacaactacttcattgacctgaagcttgatttttgcagctccgataattgctcctacacatgctcctgcaagcattcctgcacaaaaggagcaaaaaatcaccaggaatcgcggtgctccctgcatcataagcgctgtcaccgtacttgccattgctcctgcatataattgtccttctccaccgatattaaaaatcccgcctttatttgcgaatgccaccgcgagtccggtaaacagcagcgggatgctcttgcttaacgtattcgcaaatgcgttcttagatccaaatgcaccttctatcaaagcgctgtatgcctctaatggatcatatccgaccagaagcatcacacctgctgcaatcaacaacgaacataaaattgcaccaagagataataaaagattatggagaactgtcttctgtttcatacctacactcctttcttgcctgccataaataaactaatcgattctgtcgtatacttttctgtctcttgaagtgacatcatctctcctttgtagagcactccaattctgtcacttaactgaaacaaatctgacaattctgccgatatcaacaatactgccttcccctgattgcgaagttccaacaaaacattatgaataaacttaatcgcaccgatatccagacctctcaccggctgacatgctaaaatcagatccggatctttatccacctctctgctcagcactaatttctgctgatttccacctgacaatgctccgatgagctgatctccgtttactgcccgcacatcgaatttttccattaattcttttgttttcttttcaatatactcctgatttaacatcccttttctggcataactatctttgtactgatttccgaggagataattatctttcagagaaaatccaggtaagattgctcttttatagcggtcagacggtatatatccgattcctcttttacaccgttctttcacagacattccggtaatttcttcttgtttaaagaaaatttttccacattttactttctctaaccccatgatcatctcttccaattgctgctgtccatttccctctacaccggcaattcctaaaatttctccggcacgtatttccaaatccaccgtcttttctgcctgaggaagaagtcttacattttgtaaagaaagaattgtttcccctttttccactttttttctttccaacgtcatatcaatctcatatccaaccatcagcgctgccagttccttctccgttgtttctgctgttttgagaaattccactgactttccgctccgcagaatcgttacatgatctgatactgccattgtttctttcagcttatgcgtgataaagataatcgtctttccctcttttttcatttccagcaaaatctgcagaagttgttctacttctaacggagtaagaactgctgtcggttcatctaaaataataatttccgcacctctgtataatgttttcagaatctccactctctgcttcatcccaactgaaatctcagaaatctttgcatccacatccagatcaaaatgatatttttctgataaatgttttacaatttccttccctttttttctgtcgatcataaagtttcccggttcactgccaagaacaatgttttcccatactgtcatattatcgatcaacataaaatgctgatgcaccattcccagtcccatttcaaatgctttcactgctgtttgatgtttgatctcattcccattaattttgatgcttcccccgtccggctggtaaagcccaaacaaaatcttcatcagtgtagtttttcctgcaccattttctccaagcagactatgaatctctcccttttccacaagaaattcaatctggtcatttgcgatcattccaggaaagcgctttgtaatcccacgcatttctaccgcatacattctattttccctccctatctaagaatagatgtattccagttttcctgacatacatctattccccattttcttattaatactgattttctttcacaaattttttggcatcttcaattgtcgacggcactttgatttctccatccacaatcttctgcttaatttcgtcaaggatctgaatatcttcttcagataccggaaccttgctttcttccaatgtatagtccattccctcatcagagagtcccaaagatactgttgttcctactgcaagatccttgtcaatgattgcactttttgcaatatcataagatgctgtatctactcgttttaaaatacttgcaacaatgtgttctggattgactgtattctgatttgagttacatccaattgcatagaaatcatattcttttgccgcatcaaatactccaagaccagctcctccagctgcgtggaagataatgtctgctccctggtttttctggctgatcgcaatctcttttgctgttgtagtatctccaaacggattatctcccgctacaaaatctgaaagacagttgatctttggatttacatactgtgctcccgccatatatccagaattccatttcaaaagaatcggtgtctccaacgccgcaataaatccgattgtatcattgtcttccacaccatatgctgctgcatcttttttcatcagtcccgcaagagcacctgccaaaaaggctccttcttcctcttttgccgcataatttacgacgttttctgcctctaatgttccatcaataaatgcgaactgctgatccggaaattccggagcgacttttgacaatgcatctgtctggtcaaaccctacacaaatgattgcaccgtactctcctgacgaagccatatcccgcatcatcaattcaaactctgatacctgagttggttctgcataatcaaaatcaatatttaattcttcttttgctttttcaagtccctcatagatcaaatcattaaatgcctgatctccaagacctccaactcctaaaatacatcctactttccctgcactgtcttttgcttcctttttactgtctttctctgcatttccacatcctgaaaaaattacagaagccatcatcaccatcgccagtccaactgccacacttttcttcttcatcttccttttccttccttttttgttttatcaaatgtctgatctattctctccagaatacagacataagttcattgatcgctctttctgcatctacttctaatgcaaaactaatgtattctgcctcaatcggcttttcccgtaaatccgttacaatcattccgcggcaataggtaccggagcactctactctcgcctttcttttttgtattttcacaatacttggaacaaccgcagctaccattgccaacggatcgtgcagcggacaattatccggtgtataattctgtactcttgatccgttcatatagtactctaaagcttttttcatatattgcactgcaggcttacatctttccgaacagtatgtttccatctgttctacatgtttttttctcaaccttgtcttcaacgtcacatccagtccaacaactgtaatgtccattcctgtaagaaatacttgatcgcatgcttccgggtctcctgcaatattcgcctctgcgaccggagatacatttcccggtgcatttacagttccgcccatcatcaccagattttttacaagcttagttgattctggatatttctgtaccatcattgcgatgttagtcagtcgtcccaatgttacgagtgttaactcctgcgggtatttctgcagcatctcgtagagaaaatcttctgctttgatatctgttctgtaagagaaattccccttctccagcagtacgttccccactccgttttctccatggatccatgcgaccggaccttcccaggttccgtttaaaggctgatttgccccgacaatgactggtatttctttctttgtattggataattcaattatcctcacggtattttctgctgcctgtactgcatctacatttccacatccggttgtaattcctacaatttcaacctccggatgatttaatgcatacagaagtgcaatggaatcatccacccctgtatcgacatctattaacatttttaccatactatttcctccgaactttactaattttcatttatttgtctacattatacttctgttttagacatatttcaatttatttgtacttatcattatatatttgtctaacttataattcataacaaaatgaaaaggaagctgtcacttcacgacttttttatcgcgaaagcaacagcttccttcttcataacctctatgaacttctaatcaaattgaatacgcagtcttttttaccgacttgctttctatttcttcttgccaacagagtgttctgcctgccccatcgttccatatccatataaccttacggtactctcgatgatttcttccaccatatttttaccagcttttgcatactccgccacaagctgcccatatcgtaccaatgtctccatcgagtaagttttcaactctcctctcagataggtttcaaaagaaatgtcctccaccgtatcttcctctgtatggatgatccgcgcctgccccgacaattgtgggtattcccctgccatttcttctctccagcttacctgaatggaaacaatcccttcgatcagctttttcttttcttcagaaatctttgggagattttcttcaatccttcgatactcttccggtactgttgactccatcatatacgcatatttttccataacaagattacgtcccgaactttccccgtcgagaagatctctttcataagaaagaagcagttcctttttccaactggtaaactgactttttctcataatgtaaaacgtctcccaatcatcctgacacccagctctgcctccggtatttcttactttctgaaacatgttccattctaattgaatgattgcttccaaaatctctgtcttttctcttttcattctctctcctgcctttaaaattctgtctgtgtgaatttctagaaaatcttcccatccgtatgtcagtttctgctcgcgaagccgatccaaaatcatagcagaaatctgctcgatctgacatacaatcggatcgtcccaattgacctcctgtacttctcctacagccttccagtgatccctttccggacgttcgtttgccaatgtttctattcgcttttgcatttcttgcgctccggacaagttttccatcccccgccatgcccatttataataaggcatgtacgtgtgatgaagcagatactctatatgcactgcttcccgaagaaattcccataacgcaaaagaagcagctgtcgtatcgccgcgacgcatacagcgggcgtaattatattgtcctgcctgtgccgcttttgctgtcgctgttgcagttttttgcagccacagttgttctggcatttctctcatcaggcgttcccggactcttgaaaattctccaagtggatctgtaaatactgctccatttaccgccatcgcaagtcgttcttcctggaaaccggaccatgcagaaaatactttttctccatctacttttttatcatcttccagaacagagaaccattccctgccaagaaagttttcatagaaatccggaatcgaaaatactccatctcgaccagatccacgagcagaagcaattctcctcttatgaccttgcaccttcgacgggagttgttcataagcgctctgaagtcggtcgccaatcttgtcatagtcttcctgtgtcagccacatacagaatgctgcgccataatcgtgatcttctgaaagcatatcatcaaatccaaggcattccgatccttccccgacaagtccaaccgcgattctgtccgcatattccgaaaactgttcccggatcatacgtttcccaaactgttcgtaataagcgcgcgccagttctatccctttttttcggtctttttcgctttctggtcttctttcatatgatttactttccactgcagaacacctttttcttgcatgcgccgccttttcccggaggattcctgcttcttttggaaatcccgccgtctccagcaccattgcacagttttcacaggtaactgcataggcatcattttctccatacgtatctaaaatcattcggagtgcctttgtatagctgtcaattgcctcttcatatctgcccgccagataatagccatgtccacacgcagaaagtgcagctgcatagtgtggatcttgtgtattccctgcctcatataacaccaatgccttctccagacagtttaaaccttccgaaatctgccctgttttcaaatacaattctgccagattcgtgtaagttgccgctgtctcttcctttgcatctgcagtttgtaaaatgacggaaagcgctttttgcagacagctgagcgcctcttcatgcgcattttgtctctcataggccaaactcatattattataaagccctgcaaatcttgcatcttcggaaggaagacagatactgtagatctgctccgcctcccggtaggcttccagcgcagcttcatactgccccgctgcccgcagtgcagtcgctgcgtttactaaagtcgttccatgttctgcactttccgacatgccaagctttctgatctgttccaatgcctcccgggcattctgcactgcctcctcatgtctgccaacactgcgataataccctgtcatttcatttaacaggatcagcaccgcttccccactgcttttcttctgactttcctcttcttttgcctgcatcagcacctctgtcaaaagatgctccgcttcctgcatctgatttgtggcaaacagctcatccaactgtcttaacacttcctgtatctgcatacattttcttccttctctaccggattctgtccgggaatcctactttgcgctgtactttccgcaatgtctttgtcgcaaaatagtttgccttctctgcattgttcttaataattccatcgataaatgctttatctttttctaaccttgcgtattcatcctgaagcggttttaatacagacactactgcttctccaactgccatcttaaagtctccatacccttttccgtcaaattcctttaccgtctcatctggagtctttcccgtacatgcactgtaaatatcaatcaggtttttcacacccggctgttcttcacggtacaggatctgtgcttctgaatctgtcaccgcacgtttgcatttgcgcatgattgtatccggatcatccatcagataaatacttgcatttggattctcatctgattttgacattttcttagctggatcctgcagactcataatctttgctcctacttttccgacatatggctccggaatcgtaaatacatctccgtataccccattgaaacgctgtgcgatatctcttgtcagctccagatgctgcatctggtcaatgcccaccggaacaacatctgcctgaaacaataagatatcggccgccatcagaactggatatgtaaacaatcctgcattaatattatctgcatgttttgctgatttatccttgaactgtgtcatacggttcaattctcccatataggtataacaatttaaaatccatgcaagttccgcatgtcctgacacatgtgactgataataaatacaatttttttccggatcaagtcctgctgcaatgtaaagtgtcaaaagagcacgtgcccgcttccgaagtgtcgccggatcttgtcttaccgtgatagaatgcatatccaccacactgtagaagcactcatattcatcacttaatgtcacccagttcttaagcgccccaagatagtttccaagtgtcagatttcctgttgcctgcattccgctgaataatacttttttgtcattgatcattgtcttttcctcctaaataaaaaacgcccatagccaaagctagggacgtcggtattacgtggtgccaccctgattcatatcttcccgcatcaaacttcctgttgtttgccaagatataactcttgtctctgtaacgtgagaacacggctccactactaaaaggctcttgcctccgttcatttcgcatctcccaaatccattcgctgtcactttccataccggcttccaccatccccggctctctgtcatgttccatggcagttactacttttggtcactgattttatctaaactatctgaattactgtaagtctaacatctgcccgcaagaaagtcaagcagacctatcttcttttctatgattcttttctatgactttaccagtcttcaacctcatcgtcataatagataactccttcttctatgacctttgcaatgccatccttaatttctatcacagataccgcacaatttttctgaacaccactgtcccaaaactgctctaccccgattcctttcaccgtatctaaaagtgcccgaagcattgcgccatgcgtggacaacagaatcgtcttattttcatatgctttcttctcacagagatctgcaagaaacccttttgctcttttaagcagttcttcaaaactctctccaccttccggagcctgataacttgctggatcatcataaaaataatggaactttggatccggtatattcatcttctcacccttgcaataatacccttccaaacatccaaatcccatctccgccagcctctcatcttccaaaagaggaatttctctgccttccagcagaatctctgctgtctcctttgccctcttcagaggacttgtgatcgccagatcaaacgaaagatctctcaaatgttttgccgtctttctcgcaagagtcctcccgaatgtattaagctcaatatccgactttccctgtagctttctttccttgttccagtctgtttctccatgtctgattaaatatagcttcatttgctcaccaaaccttcctctcccatcttttcctgattttattctcattgtatcacactttttcctcacttgcacaaaaaatcaaaagcatttataatggaagaatcaaacactggaggtaatacaatggaaaaaatcacaagttttacaatcgatcataacaaactcgttcctggactctatgtctcccggaaagatcatgtagaaggagcagtcatcactacttttgacatccgcatgaccaatccaaatgaagagcctgtcatgaataccgctgagatgcacaccatagaacatcttgccgccacctttctccgcaaccactccgtgtatggcaagaaaactatctattttggtccaatgggatgtcgtaccggtttctatctgcttcttgccggagattaccagtcctcagacattgtcgatctgatgtgggaactttttgtatttattgcagattattacgatgaagtgcctggagcaagcgccaaagactgcggaaattatctggacatgaaccttccgatggcacgttttctcgcaaaaaaatatttgaatgaagtcctcacagacattcaggaagaacaattatattatcctgaataactatatgaaaatgaaagcagacatgttctgtcaaaaactcattcctgttttttaccccgaataagtactctgacagaacatgtctgttttttcacagtatttttctaaaataacctatatgatcttgcaatccaatttaatgcataccttttttcagcacattttccctgatgtacaaataggtagcctcctccccctgctctgccagcatcacaagaagtgtctctaacagtttctgggtttccggatgcatcattttttcatatccgctgccactctcataatattccaatgcactccgattggtatattcgtcttttttataaactttacaggccgcaatccgatctacaaacatctcgacgacatatttttctggcattttcatgccgaccaaaccactctctccatccaaggcataatcaatccagtattcatagtgatgacggtttcgtcctttatgatgcagccatgcagaagagtatcctatcgcctcccgctcagcattgttcggacttctcgttccctgataatattttgctccgattctgaattccgtccaactatattttgacagatcatggagaacgccctgacggtatagtccaagacggaaacactctctcatcaccagcaatttatgatatgtaattgtacaaaaatgtctccatgcatttcccattttgttcatccctaccttaatgcttcttattatcaaagcccaatactttacagcatcttaatatatcagcagacctattccaagcaacacaagtaagtgtagtggataaaataagtaaaatacatatttcatcttcggtccctgttctccgttgtatagaagaataaacggcagcgccagcaccgcaaacgcctggatatatcccatcagcaaaatattgactgcagctaccgaaagacacatccatactttcttttcacggaatgcccaaaaacacaaaatgagtaagagccccatcgaactgtaatccgtcctcaaaaactctgcaaacagcataaataggatgaccatcaaaaagtttaaaacagctggataccgtttcgtcagatagtaaagcataaccaaccctatgaataatgtgaagaatacattctggtgtgttccgtctaaaatccttccatagaacaaaagatcaaatgggatctctgagatcaatgcaaataatcctattcttgtcatataccggatcacgtcatgcgtgtgcataaacccttccaccagaaggaagcagaaaatcgggaaagcaatccttccgatgattcgcaaaatcggatattgcggaagcagcaccgctcccacatggtcgatgagcatcgttgtaattgcaatcattttcagccaaaaagaattcaatcctacttttttcgtcattccattcatatgcttcttgttcctctcattgtttcttgggacatccctgcaacaaaagccgccacactgcgtccttccaaaattatacttctttttccttcgatcaaaagaggctgttcatagaatccttcttcagtcgacatcacctgataccatgcttgatctttcggcaaagctggaagggcgaaagaatgtgcgatccagtgcatattatagagaaggaaacagttgctctctttctttggacttccactgtataaaattccaagctgcctgctcgacgcctcctgttggatctgccacgccgcctctccatgataggaaatatcaggaataccgctgccacttcggtctgctcctgtcagtgcttccttctggtggagtatgccatgctttttccgaaaagcaattaactctttgacatagtgaaaaaatgatttttctcgctccagtctgctccagtctacccacccggtctcattatcctgacagtagacattgttatttccaccttgactgtttccaaattcatctcctgcaagaagacaaggtgtcccctgtgcagtcattaaaagaaacatcgcatttctcttctgtccctgccgcagtttcactatctgctttttgcgtgtctttccttctaccccacaattccaactataattatagtccggtccatcctgattctgttctccgtttgcttcgttatgctttgcatcatacgatacaagatcttccaaggtaaaaccggtatgatttgtaatatagttgcaggatccggacacagaagttttccttcggaactgttctgctacactggcaatcattccttcatcaccttttaaaaatctccgcatcgtattctgaaaggattcgtctttgataagcaattttgtcccacttaaaaccggatctctccgcaaaaattctacaggtacctgatacggatttaaaagaaatccgtcaatatgatactccatcacataatacctcagacagtcctccacaatctgaaaccttgtctgtgctgtaaagggaaaatcaagtactacttcaatcccttcccggtgacatgtctttacaagttctttcaactctttttgcgcatcatgatctgctgcataagatgcctttggtgcaaagaaaaatccctctccatatccccagtaattgacctttcttccgcgctcttcaaattcataaaccggcatgcactggatctgattaatcccaagctctttcagataaggaagcttttccatcacgccacgaaacgtcccctttttcttcactttggaagaggaatgtcttgtaaatcctcttacatggagactgtatgcaatgacgtcctcttccggaatccgcagcgggcagtcatcttcccatggatattcttccttttggggaagctttcctctcacttgatgtggtgcaaaatccgcctgatcgttccatcgttctctccctgcaatcccttttgcataagaatcggtaacaatcttgccatcgatctcatagttgtattcacacgcttgtgcaggaagatctgataacatcacacagcgcactgtcccagtcccggcttcctctttcatcggaatcttctccatcggaacattttcaccacacttatataacagaagggtacattgctttccttctttgacctccaccgcaaaatttaatgcttctttctgcctactgacgccaagcggcagtggtgctccctgtacgaccttcatttcttcctcccttatttcacctattattgccagccatctgccccatacatatcaacattatcctttgtgatcagaaaagtttcttcataaatcggctcttttatcttttccccatccagcacctggaatgctgattttactgcatctttcccaagggtaatcggccgctgagctgctgttcctacaatgatatcgtctgatttttgcaattcctttttcaaatccggagaaccgtctactccgtaaatcacaaccccggcataagcctgatctgtctctgctgccctctttgctccaagcgccgtctggtcatttccacacatgatcacatccacatccggatattgtttcagaagcctttttgtagtctccatagatatttctttacttccatttacattctctcttgcgacaatctcaaatccctgatccgcaattgcctcttcaaatccggtaatcctctcgttgattgaatttgtattcggacattctaagatcagtaccttccctccttctggaaaccgctgtacgacatcttctccacatagatatcctgcctgcttgttatctgttccaacataggcatctaccagattaagatccttcacttccgtgtcaatgttgataatcttgacacctgcttctctcagggcatccaatcccggctgaatcgtctcccagtttacagggcttaagaaaatcgcatcaatgccttcttcaatcatttcattgatctgttccagctgaagggtatcatcccccttcggatcgcgcgtgatcatttgcccgccctgcttctccacttcttctcggattgcctcttccagcacagcaaagtatggattatctgccatcgtcgtgcatgtatatccgaatgtataaacttctgtctcttcctgtttctcctcctctggacttactgcattatcttcaggtgtccctacatttttcttacagcctgaaagaggcagtatacacagaatcatgcagaggatgattgatagtatcttcttttgcatatgtttcctcctatatcatcatataacattctactaaacacatatttcacacatataaatttaattttacctatttttatttcaatgtcaatagttttccccttgcatttctgaccggagtctgatagagttatcatatcagtaattcaaagatgaatgaagcagaaaaggagaatattatgagtgaacacaaccacgattgcaactgcaatcacgacgattgtaactgcggatgccacaatgatgaagcagtcacagtaactttaacattagacaacgatgaagtagttgaatgtgctgtcctcacgatctatgaagcagatgaaagagaatacatcgcactcctccctctgaacgaagatggagagaatgaagacggagacgtattcatctaccgctataaagaagtagacggagaacctactcttgagaacatcgaagatgacgatgagtacgaagttgctgccgatgcttttgacgaatggcttgatgagcaggattttgatgctttagacgacgaagaatagattccatctgatcccgagcagaagcaattgtaaaagaggcactgaacaatctggcaaacaaaatgattccccattagaattacaactaatgaaatggtcatttctaaaaacagatgctcagtgcctctttaattatatgtctcttctggaaacattccttagaaattcattcttatcttgtaggtctgttctgaaacagttccccaagaaatctggactgctccattgcttttccatttttttctctcacatagctgatcatcaagtgtttctttgcgcgtgtcattgccacatagaacattcgacgttcctcctccatctcctctggaagttctgcctttttatacggtgtcacatcttcgttggctccaatgataaatacggtatcatactccagcccttttgccgcatgaaatgtcataagagacactgcatttctattctctgtccgtgtgactgcctgcatccgcaattcctctgtatatttttcaatatggtcgaaccattcttcgattgtcttaaattctttggcacgctcttccatttcccgaatcaattcctgaagatcttccagtttcatcttccgtttgatcgcatactcatttaagaacagatcatagccaacactttttctgatatactgaattgccgcatacggagtcattcggctgatcactttcagatccacttccagctggtcgatccgatctaccatccagtctttttccatataatatttccgcaggttttcaaaagaaatctctccgcgatccacactatctctgccaatatatctatttggccgattcatgatcatcagaaaatctccgcggtctcttcccccaagcgccatccgcatatatgactgaaaatctctcccgataaagtgctcatacagattgggaagatgctctttcatctgaaatggaatatgatattccatgaatgtctccacaagcgcacgcggctccgtatttgtacgatataataccgcaatctgcgatggctcagttcctgctgcaactgcttttgcaatctgttctctgacgtaatggctctcctctaccggatgacgtacttcctgaatatgtacattgtccccctgctcatttacagtgataatctccttctgatagcggtttttattccgctcgatcactcttctcgcagcactcacgacagccttcgtagaccgataattcacatccagtataattgattttgcgttgggataatctttagaaaatccgagcatgatctctggccttgctccgcggaaacggtaaatagactgatcatcatccccgacaataaacagattgttttctggaagtgcaagcatacgaatcacatcatactgcacttggttgatgtcctgaaattcatcgattaaaatatattgaaattttttctgccacatttgaagaatatccggtctcttctgaaacagttcatagcataaaacaagcatgtcatcaaagtcgattttctttaaaagctttcttcttcgctcatattcctcataaatttgacgaaacatctgatccgaacagttgctggattcatactcctccagcgaaagtctgttatttttgatctggccgatctcagaggcaattccctgtaaaaattctttctcatcttcgatctccaattccatcccggcaataacttcccttaaaagcatcatcttttcttcctccgaaaaaatatttgatgcattcatccggtatgcccatttcaaaatcccatagtaaataccatggaaagtcccaaacgtaactggaaaacgatcgtcttttgtaattcttgcaaatcgctcccgcatctccttcgccgccgcttttgtaaaggtaatgacaagaatctgctccggtctgaccccatactttttaatcagatattctactcgtcttgtgatgaccaatgtttttcctgaacctgggccggcaagtaccattgccggcccatttttatgacagattgcttttgtctgagcttcattaaaccccattatgcacccagcagttcaattgccttgcggatacgattcaaagactcttctttgccgataatctccataatctctgtcgcaccgcccggtgtattctgcttaccggatactgccgtgcggaccggccacatcgcatatccgttcttacagcccttcttctctacataccctttaagcatttcatataaggcatcattgctgtaatcttcctgcgcttcaaataatggaagcaattcctgcaatacttccagcgatgtctccgcatttgttttcattttcttatgtgtgtacatcgcaatatcatactctggaagctcctcaaagaaatcaatctgatccttgatatccgggaacacttcaattcttgatttcacaagccctgcaatcttctttaaatcataatctttatgaataacttcctcaatatatggttttgcaagttcataaaacttgtcaaaatccattgctttcatatactcaccgttcatccattttagcttcattgtgtcgaacacagccggagatttgctcatatgatgatagtcaaatgcttctacaagctcctccaacgagaaaatttcacggttatccgatgggctccatccaagcagcgctacatagttcacgattgcctctgtcagatatccttgttccagaagatcttcgtaagaagaatgaccggaacgcttactcaacttcttgtgctcctcatttgtgatcaatggacaatgaacgtaagtcgggatctcccatccgaatgcttcatacaacctgttatactttggtgcagaagaaagatattcatttcctcttactacatgtgtaatccccatcaagtgatcatcaacaacatttgcaaagttataagttggatatccatctgatttgatcaggatcatatcatccaattcttcatttggaactgtgatttccccgtaaatgtcatcgtggaatgtcgttgttccttctgtcggcatattaatacggattacatatggttttccggctgcaaggttcgcctcaatctcttctttgctcagatgcagacaatgtttatcgtatgctacaatctcagtaccgctctctgacaccttgctctttaaagattctaaacgttctttatcacaaaaacaatagtacgcatcaccctggtcaataagctgctttgcatacttcatataaattcccatcgcctgacgctcactctgtacatacggtccgacaccaccgtccttatccggcccttcatcatgaatcagtccagtcttctccagagttcgataaatgatctcaagtgctccgtcaacaaatctctcctggtctgtatcttcaatacgaagcataaaatctccgccttcatgttttgcgatcagatatgcatacaatgccgtacgcagattacctacatgcattcttcccgtagggcttggtgcaaatcttgttcttactttactcatttttacacactcctgttctcttttgcttgcgcaatgcttttcgctatgttccattatatacaacttattcacgcttgacaaggagaaacttggagaaacaaagccttgatgcggattcctccttctcttgggaaatctcccataacgattcatcttaatataacttatgtagattttctgactggcaaagtatctttaacaatgtctgatctactctgtcatggatcactccatccgcatacttatctgaaaagtgctcctttaatgtaattaagatcaacctgttgcctccataatacccaagtagctgttcacacaatgtcgtttttaaattcgttccaagtgcaagaacaacatctgctcgcattacctcttctgccgcttttgtcatcacttgattgtctaccatctcgccatagagaaccgccctcggacgaagtgctgtattacattttgtgcaaagcggaacacgccgagactgtctgatataatccaaagagtattcttccccacaatgtggacagtaatgctcgcaaatatttccatgcagttcaatcacatttttacagcctgctcttgtcggaaggtgataaactcttcttgtgatcacagtatcgatcagacccttcttttctaaagctgcgagagcataaaatccttctcccggcggcttttctaattgcgggagcatctcatttcgatagaattcatagaataactcttttcttgtagaaaatagtgaactactgaaaagttcctctgcagaatacctatatttcttctcgatatcgtagctttcctgactgtcgcggatcaacatataatcgctttctagaaccattccatttccgcttaaaacgacagtatatttgctttccttcaaaatgtccatcaatctttctacggtcatacaatatcccccactttcatttttatcagagatattgtaacatttatttttatctatttcaataaatagacatttgtttcttataatttataattatttcattaattttcagtttttatctccattgctttccattcaccttatataaaaccgaaaaaaagaaagcatcccacacggaaatgctttctctttctataactaaatacttagaggcttaattaattgatataacctgcttttttcagttcttcttctgcttttgcaagatttgcatcagatacacggatgataggtcctgtacaacccattccactttctgcataaatgttgatcttccaaagtgcttttacagcgtcctcaagatccattacttcgatacctggaatctgtgctgtaacgatctccttcggaggttcttttacttcctcttcagctgctgctggttttgctacagttttgtatttgttaaggatatcattgaatccagcttttttcactgctgcaaattcatcttttgcaacttcaaatacttttccacgtacaagctgtgctgcataacgaatcgcatttgcgataaccggagcaccagaagcacgggaaacgatcataacaagctgttcgtatccttcaccgatacctggtccatatccaaatcctgttgcttcaaaacttcctcctgtattgaaagaagaaagcatcttcacaaggatattacctgtaagagaatctgtaaccatgatatctggagaagcctgaagtacatcattacctctcatcacacatccaccgtcagctcttcctgactctgcaaatgtaatatcatatccgttgctctgaagctcttttaaagctttctcagtctgacgagcaccatctacgtttaagataccaacagatgggttctttttcccgcaagcttttgctgcgattacaccgtagattgcatttttaatcataccttcgatacgatctgtgctggatgtacctgttgtatttgcaataaacatttcttttgcagttgcaggtgttacacaacgtccaacagtagaaacaccgattgggaatgggaaatgcattgttactgccgcatccacttctttatttttcagcatttcttccatcttatcgtggccttcttcatcgttagccactttgactgttgtaactccttctgcttctaatgtaccgatgtagtacacatcgattccatcctttgcagcctcaattgctgcagccatggagttttcttctccgtgttcgcttcccatacctgtaagagcgattttaggacgtttgccaaagcttcctgtctccagtccctgagcaatctccataaaagtggaagcaatcattttttctatatttgccattttgtccacctctctattctgctgccataagagtttctgcaaaatctttcattgcttttgcgatcaatccttttacttcttcttcagaaacaccagaattgtcttctgcacctgtgtttgcctgaattacaaatgaaacaccatcaaaaaggtttgtcatacggccaaggaataagcttcctttaccaacgatcatagcatttttgatcttacctgctttgatatcttctactgcaaatccgatgtacggaacacctgaagggatatgtccctgagtcggagcccaacctgtcagaccgtgttttgctgcaaatcctggcatatctttcttctcaagatcaccttttttaacagccaaagcagcaatcatcttatagttagctaacggaacatcaccagctcctgcaggttttgtaatatctgggttctgcatttctggagagtatttgtcaatatccgtaatctttaatcctactcttgcaagaggatcagctacaaggcttccgattacgttctgtggagcagatcctgtaccaactgtatgacgtcctaagatgtcaaggttgatttctgggctaacaccatcattttctgcgatgattacacagaatcctgcaagacagtcttctaagattggaagacctttcttcacatggtcttttccgttcataccaagttttgctgtacatccaccagctgttacagctacacatttgtaagcacctgattttacaagagctgctgcttcaattaaagcatgtgaaggaccagcacagaatccacgtgagtcagaacctgttgcattcataagtccagcaacttctgctgcagcttttgcaaagtttccaccaccacgctggttcatatcaccacaagcttcttctgcacagtcgataacgtactcgatatctcctgcatcgattcctgtgtttcttacagcatataataaagcaagtacacttgtagctttgctcatcatgttttcatgcattacatgagcagaaaggttcacatcgatatcatgtgctctcttcacacaaccaactaatttgccagcgatgtaaagtccttctgcatgttcttcgtttaccagatgctcaacttcactaagttctacaccttcttctactcttgctgcgattgcttctgtaataattggattagaaacaaatgcttcttttgttgctgcaacaaattctttgtctaattttacaacttcaaacatatcacatgtctgaactaaaagaaggaattcgttctctggcataatctcaccgtatttaccaaatctctctgcgccttcttttactttatcatagtaagggaactctacttctgcgagttcatccggatgtgcgtttccaatatatacctggtttggccagtagtttacacattcttcgtaagaacgaagatgactttcaagttcttttaagtattcagattctgggttcacaactctctctgttgtctgagttgttccattatacactaccatctgtggagtatgtgccagtacatagctggctcctttaattacactgttcatttgaaggttccacctttcttttagatgtttaaaatgagaattttttatatatactaaaaataaagggcgatgaagtaagcatttactccatcacccgtagaaaacccaaaatcaaatcagattttcgttataaatacctatcttctataaatatttacaaaattgttcacgaatagatgacatctcgcttacgatatcatcaacgtcaagtaccatttccatcatacctacctgctcatcgtaaacagcttcatcgaattcttctttcaattctggttcacatacatgatataccgtgagtcctaactcgacccctgtcaatggtcctgcgaatgttgggtcaccagcagtaactgtctcagcagctaatcctgctgcctctccttctgctgctccaacgagtactactaaattctctgcaccgaattcgtctgcaaagtctttaactcttttctgattctcaagatccattgcacctgcgctagttcagacgaagcattcagttgaagaaaaaactacttctccaccggctgtcttaacacattctgcaatagctggtcctggcacaccatcacggtcgccaatgataattactttttttccatctaaaattgccatggctttttctccttcctttcattttacttttagtataaatttatagttggaatgctttcacactcccgtaaaagcctgttcggctttgtacgcattaagtatacatgctttttctaaaaaatacaaatagattttctaattagatgtattttttgatcatagcttcaatattagcttctgtagcatcatcttttacaagttcttctactttctctccgtctttgtaaatagccataacaggaagtcctaagattttctgtccaatagcaagacgacgagcttttgttgtattcagagatgtgaattttaatttatctccgtattgatctgccatagagtgtacgaatggcattaatgcctggcatggtacacatccatcaccaaagaaatctacgaatacgtatccttctgcttctaatacttctgcctgaaatgtatttttatctacttctaacattttacatgccctccttgtgaaaaattattccatttcgttaatgtatttctcgcactgtgtagtagcgattgctccgtctgcagcagctgtcactacctgacgaagactcttcacacgaacatcacctgctgcaaatacgcctgggatatttgtcttcatattatcatctgttggaatgtatcctctttcatcaagttcaagaccttttccttcgaagatctttgtgcttggtaatgttccgataaatccgaatacaccaaacattccgtcttcttcatcggcaacgatctttgtgagctctccagtttttacattcttaactgtcatttcagaaaggattccatctcctccaacttcctctacaacagtatcccacataaagtgaagtttcgggttcttgaatgctttttcctgaatagattttgctgcacgaagttcatcacgtctgtggatgattgtaacttttcttgcgaattttgtaaggtacatagcttcttcaacagctgagtcgccgccacctactacatatacttcaaaatcttcgaagaagttcgcatcacatgtagcacagtaggaaacaccttttcccatgaattctttttcacctttgcatccaattggtcttgcaaaagcacctgtagcaatgataagagttttaccgcagtattctccttttgcactgatcagtttcttcacgtcaccttccagtacaacatcattgataacatctgttactctctctacaccgaatttttcacactgctctgtcattctggcgatcagagatgggccactttcaccctcaacaatctgtccaggatagttttcaatctcatctgtaatagcaatctgtccaccgtctttacctttttctacgattaatacagacattcttgctcttcctgcgtacagacctgctgctaaaccagcaggacctgcacccaggatcactacgtcataaattttgctcataacgctgttctccttctttcttgtagaattattcgaaaattgtctgatcttctacttctgtctgaagagctacaagagccttctcaactaattctctacgtaatttatattcctcttccttctctaaagcaggatttccaagtggatgtggaatagcaattgtaggaacgattctgttagcaccaactgtcatagaaattggtgttactgtacacatgtgtactactggaagtccagcagcttctacacctttaaccatcgttgcaccgcaacgtgtacaagtacctcaagtagaagtcaggataactgcgtcaactccatctgctttcagtttctgagcaaattcatctgcaaatgcttttgaagatgctactgcagtaccgttaccaactgttgtgtagaatttattgtgtaattttccgatgattccttctttttccatatcgcggagaacgtcaaccggaagaacacggtcagcatcttcattagcgtatactgggtcgtatccaccatgagctgtctcgtatgtttcttctgttaaatccataactcctgtgatatcgtactcaccatagtgagaagcgtttgaagattcgatatgatctggatttcctttcggaacaataccaccagatgttactaaagcgattgtagctttagaaagatcttttacagctgggtttggagctactctgtcgaatgccggcattgggtattctgttgtgtatggcttatcagctaattttgcaagtaacatatctactgcacgtctagaaccacgtttttcttcaaagaagtttacacgtactccgtttggcatgtagttatcctggcaagatgcaccgattgcttcttttttagctaatttaagagctaatggagccattttcttaacggcatctctagcacctgctgcattgttctttgtaggtactgtatatactttgtttttgaacatatcagcacctgggttttctacgtacatacctgttactgcaggaattcctaattcttcctgaacagcgtcacagattgtaccgcaagctacaccgtaacgtccagcgttgaaagctggtccagcgataaatacgtctgggtttaactctttcacccatgctaaaattgttgcttttgcttcttcaagattctcgttgaagtaagagtcaccacatacgattgtagagataatctctgcttcatctttgaatgctgctttaaatgctgctcctggtccctttacttcaccatcgtgacgctctgcagggatgtgagccatttcttctccaccgatctgagcgaagaactggttgatataatgtactactttaatcattatctttttcctccttccctatcttgcacttaagtaaccgaaacctgtttcgtttgttgcaccagtaattgcctggatctcaacttcgattgttccatcttcacgtaagctgtgttcgttaccaccagcgattgtgttcacgtaatctaatgttccgattactttgtcaagttttggaagtacgattacctggttagcatttccgcctgtgattactgcgtcagctgctacgtcagcatctgctaatgactgagattttccatcacgtccagcgtattcgtcagtaatgattactgtcttaacaccttctgcttcgattttcttacagttcatgataaggtctgtatctgggttaccgaaaccttcctgagataatacgataccatcaagatctaataaacggcaaagtttagctgtccagtctgatgagcgctgcttatcagcaaggtatacgttttcgtttgtaataatatggcaaacaaagtttaatgttttaccgtgttcttcaaataaatcatgtacaacaccattgttttcatgtacatatgtagggttcttatcacatgcagatacacagttaccagatacgatagcaccgtccataatttctgttggtgtcataattgtagataatgttttcttagcatctactccgtatacatatgtatcgtgaagtaatccctgagactgtaacatctgaacatatgctactcttggaagtcctgggaatttttcagcaccttccataactccatatgtttcaaatacttctgttttatctggtgtcagttcacgagctaactctccaaggtaaacagctactctgaatcctgcaaatcttacagctggctcataatcgtgctgtttgattccttctacaggttcacatacaacaactaagttgtttaattttgagaatggtgtatattctgcacctgggcctgtcatatcgatgataccttcctggaaaccaacgatcttacctgctgtaacaacagccatacctttgagtgcatatgttttaccttcaccaactgtatccaccttgctgattacacctgggaaaattcctccacgaccttcaacttttacacgtggctcgataacatcttttacaggtgtgattcttacgctctcacctggtcttgcaatatcaagcttgcagtctttaattctttcgtcctcaagaacgattgcttttacagcttcttcatcaacataaagtacgccatcttcgattttagactctggtccaaactgaatgtctttaatgttaatgtgacctaattctaatcttctcactgtaaattccctcctttattgtgtttagttatatatgctctaagtaccttaacgtactattacagccaatgtcattgaatttttcattttctcttgctattcaatcccatctgcgattctttctttaaaaaatcgcagacggaattgcactctcaatcaatttcaaatccaccacttgaaaatcttcatagacttccggtgcatacttatctgatttaaactgaaattttttacaagactgaatcgcatactcaataatctccatagaccgcggatccagcttttctttcttttctgacaccataatcgatttatacggtgtttcattcggcttcacacttccagacagcggatgtgtcagaagctcatatccttcataaatatagtttcttacttttctaagtatctcctcataggagcactctacgaactcaatatgatattcattttctaatgtttcttttactaagggattgtttgttactatcttaaatgcttttttcatgttctcaccttgttgttaaaaaaaggacggctttcgtaactgttgctaccaagtcgtcctttctgttcttttctgacattacgtccaagtccagaatatggtccatttctcactccttttgcctgaaagtttcaccagttaattgaccgttacctggtttgcatcttcggcggtttcctatttcagaaacgctctcacaagaaatatcttcccatcttcttttccaatatttattttttcttcatctgttttggcttgaagttattaaagtaatctttgtgtacttcttttactaccttactcagtgcaaacagaccgataatattcggaattaccattgcactgttgaagcagtctgccatgttccagattaaatcaacttttactgctgatcctgctacgatacataccgctacaagaatcgcatatactttcactgcttttgatccaaataagtacttgatatttgcttcaccgaagaaataccatccgatgattgtagaaaatgcgaagaagaacatacagattgcaatgaaaacttctccaaattttccaaatacgcttgcaaatccagcctgtgtaagagctgttcctgtgaaagctgctcctgtcaatggatctgtctgtcctaccataccacttgtaaggattacaagtgctgttaaagtcagaacaacaaatgtatcaataaacacacccatcatagcaacaaaaccttgttctacaggatgatctacctttgcaactgcatgtgcatgtggtgtagatcccatacctgcttcatttgagaacaatccacgtccaacacctcttgcaagtgctctagatactgtccaaccaagaactccaccgccgattgcctgcggattgaaagctcctacgaagatatcgtgaaatgctttcggaatcatatttccgttacagatgatgacaatcaatgcacccacaatgtagaatgctgccatgatcgggacgatcttttctgtcaaggaagcgattctcgaaataccacccacaaagacaaacaacgaaatagctgcgataataataccgacaatccatggattaattccaaatgctgttccgaatgcatctccaatggagttagactgtactgcatttcccataaaacctaatgcaaagataatgagtactgcaaatgttgctgcaagaatcttaccgaattttccggtaaatgctgctctgatgtagtatacaggacctccggtaactgttccgtcatctccgacctgtttgtacttctgagccataagtgcttcggcataaattgttgccattcctaagaaagcacttacccacatccagaaaattgctccaggaccacccatagcgattgctgttgctgctcccgcaaggttacctgtacctacttgcgccgcgatagctgttgctaacgcctggaaggaagacattccttcttttccggccttgtcgctttttttgaagagacctccaaaagtacgcttccagccttctccgaatcctcttacctgaatgaagccaaggttaaatgtgaaccaaagtccagcacctaccaaaaccacaatcaagattttgtctgctagtacaccttgaatggctactactaaatcattcagactcaaacaaatccctcctcacgcaccgtttttcggtggttttattgaatatctcttatgtcatatatattacatgatgagcgggattatttcaactctttttatgcattttacacatctttgttcagatttttacgcatttttaggtgtttatttatatcttctatatatgaactttgttttttatttattttgcatatttcattatatcttattttgttcattttgtctattgtcttttttcatcttttgaaatcttagtcaaatttttgtcaatttgctagttttcgacagaaaacaaaccgctttcgacaaaaaagctatgaaaaaagacgaatgtccgtttggcattcgcctcttttctttctatacaaaatatctatttattgcaattgtcacaatatttcttctacttccacacttacagcgctatcgtacattagacattgatctcagcggtcattccaagaactgcttgattctcttctaaaaccggacggattacattctcaaggaagctttctacctgttctttcgcccgtcctgtatatctggacggttccattgtttgctgcaattcttccaatgtcatattaaatgccggatctgccgcaattaattccaacaaattattatccagacctttttcctttacattgcgtcctgcctccatagaaagttcgcgaattctctcatgaagttcctgtctgtctcctccggcctttacggcatccatcataatattttctgttgccataaatggaagttctgcacgcagacgcttttcaatcaccttcggatatacgacaagtccatccaccacattcaggcacagatccaaaataccatctattgccaaaaatccttccggtatgctaagccttttgtttgcagaatcatctaaagttctttcaaaccactgtgtagcagatgtgattgccggattcagtgcatctgccatcacatatctggacagggacgcaatcctctcgctccgcatcggatttctcttataagccatcgcagaagaccctatctgggatttttcaaatggctcttctacttcttttaaatgttgaagcaaacgaatatcattagaaaatttgtgcgcacttgccgcaattcccgcaagaacatttaacacccttgtatctacttttctagaataagtctgaccggaaaccggatagcaggctttaaatcccattctctgtgcaatcatcggatcaatcttatcgatggtgtcctggtccccatcaaacagttccaaaaagcttgcctgagtccctgttgttcctttggagcctagaagtttcagacttccggctacatattccaaatcttccagatccatcagaaactcctgcatccaaagcgttgccctctttccaactgtcgtaggctgtgccggctgaaaatgcgtgaacgcaagcgtcggaagtgctttatactcatctgcaaactttgcaagttctgcgataacattgaccagtttctttttcacaattttaagcgcctctgccatcacaataatatctgtattatctccaacataacaagatgtagctccaagatgtataattcctttcgccttcgggcattgctggccaaaagcatacacatgcgccatcacatcatgtcgtactactttttcacgcgctcttgccacatcgtagttgatacaatctgcgtgcgccttcatttcttcaatctgttcttccgtaatatttagtccaagttctctttctgtctccgcaagcgcgatccagagctttctccatgtgcggaatttcatatccggcgagaagacaaactgcatttctctacttgcatatctttctgataacgggctttgatatctgtcagtgctcatattgttattctccttctacttttctttataaaagtccaagacggcggaaaacctcttcataggcttcctcgacgttccccatatcacggcggaatctgtctttgtcaagtttttcattggtatctacgtcccagagtctgcatgtatccggtgacacttcatctgcaagaatgattgttccatccggcaatcgtccaaattcaattttgaaatcaatcaatttcatacctgcatccaggaaatatcctttcaaaaattcatttaccttttttgcataagtacgaatggtgtcaatctcctcctgctctgccaatcccagtgctaacgcatagtcatcattaataaatggatctccaagttcatcatttttataactaaattctaaaattgggcacaggagttctgttccttcttcgacatccatccgttttgaaaagctcccggctgccacatttcttacaatcacctcaagtggtacaatctccactttcttcacagcagtttcacggtcatttaactcttctaccagatgagtagggatcccttctttttccatcatcttaaaaacatgatttgtcatccggttattgaccactccttttccagaaatcatacctttcttctctccattaaatgctgtcgcatcatccttataagatacgatcaccacctcaggatcttcggtcagaaatactctttttgcttttccctcatagagttgttccatttttttcatatgctttcaccaattcctttcctatttttcaatcagcaaagttgattgcgtcggtacgttgattttatcttttcaatttccagtagcttttcttttccttctgcacgtttttcctgtgcgtatgtctgaagttcctccatcagttcccggtgcactttcgggtacactgtgtttttcagcagaaagagttcatattcttcctttgtatacgccttatacgcacagtaaatatatgctttgacgatcgacggctctttgtatgtctgaaacgccttttcatacatctccatcgcttcccggtaaagaaattgtctgccatatgccgatccaaggcacgcataaatctttccataaaaagcatcttccaccgaatcatccctatcgccatataaaatggactgatacacaagaatcgcatcttcgaattctctgttttccaaaagattatccgctttatatttctgtcgttcaatttctttttgatttttcaaccggtccaaaatattttggatctgctgcagttctcccgctgtataaatcgaagagctcgacaaaatccgcatgacaaatcgttcttccgagctatgcttttgcagcatcgtccgaagttgctctgccagccttaaaagcccaagttctgcttctatccagtcacagagtctctcattgacaatcgtataatcaatcagatacagattattggagagataatagcagagttcttccaatgtgtagatccggcagtggatccgcgacacttcgtacggctgttttgcgcgctttttattacatagtatcaaactgctcatttcttcctcctaaataaatcgtatgttccttgacaaaatccgtagccgggaaaaattctccaaatccgacatctttaaacagaatcttgcagacattctcttcgacaaaaagaacttctacttgaagccggatcgtatattttgcacgtttgggaagctcatttacttgcacgcgctcgatgcgtgatgtgccggtcagcaaggactccaccttgatttcaatatcatccgtgtcttctaaaagcacttcccactgaccatctccttcataccaatgtctgccccatggtacaagtgggtaccattcttcttttccatgctgccgcagctgaatagaaatctgctctttcagcttactttcatcaagatacaccggcccttcctgttctttcatcagttcttcctgtccacgctggtatgctgtatagcatgctcctttgctgtacagattatttccaagaaatgcccttcttccattacacaacaccttcaaggaattcggataccagttattttcaaatccttctcccatcagaaatacagaggaaacgatttttttctcaaatacactctcgataaatttttgaaagcgaaaatctgccatcttagcctgctcgacattcagcaccggatacaccgctttcagctcttccatctgagcacttgccacctcatcaacggtgacaaacgtctgttttttcaactttgctcccgccgcaatctgacttaacatatatgccttaatctgtcttttgtcacagtaaaacagcgccgattcatattgccaaagctcttttggctgataaaacataaaatagcagtaactttctttgtagtcctgcacatggatcttcttccgttcgattcccatccgctgcccaatgcccctcagcatccttgcaatatccggactcatctcgggcacacagaagacaatcgaatcaatcttgtcaaactgctgaagcgtcagacggataaattttgcaagaagccacactgcatcgtaagttcttctccccaaatggatcttagctccgcgcatacttttggcaagcagatctgtcgccatcgccccatccttgtgttttgcatgactgctagcctcttccccgatataccatgcatcattcttgcatccgatcacaagaggaatctgatattctccggactcgtttttcactgtctccggttcatgctgcgcttcattataatagctgatctggcatccttcttcactcagatcatatccaataatactgccttgtcccatatctctcccccctatcaataaatcggaaacagaagttctgacatctgctcttcctctgcaaaattttctatcagttcttgcttttgtccttcgcggatcagctggttgatgcgcatatatttcccaatctccttctgtcgatccactttcctgcagaccgccttttccgtacgaatctcactcatttcaccagattccacgaaataatagcggagttcttctccttcaaacaagatcatcgacttcacatagacattctcatacaccggaccaagcacctccgaatgatactctcctgtctcttctccatcccggatcagttgatatcgaaaagttactttccctttcctttttgcataatatgctaccatcgtcttatcatatagctggagttcctttaaccagtctttgggatactgtaagaaaaacggaaaataaatctggcggatactcagttcgcgcagaaacgtcaagagcatgttttcctgaacatctccccacgcatgatctgcataataccgaagtacagcaatctgacacacttctggtatcgttgactggtgatgatattccatacataaaatttccatcacttcatcggcaatctctctttgctttgtgacatactctctgcacacataaacaagatatgcccatttcaaacgataatatggctttccataatagtaatccagaaaaatctccgcctccccaaacatctgctcagaaaacagcatctgtgtcaaaatacgttctgctaactggaaggtctgtatctcatactctctcgccacacgccaaagccgtttcatatcttttgtcggtccacaatagtaatttgccagataagtcagcactgccttatcataatattcctcctggaacaaagagaaggtcaggtaggtaagaaaatcatcttccgcatagttatcctctctgatttttttactgcatagatgaaaaacttcttcgtgctcatactgttctaatccattgtcctgcacctcttcaaacgtcagcggtcggctgcagtatccttcttcctcttcctgctctggatccggtctgcacaattctaaataatgcttatcataaaagagacgtctgctctcataatttacagattctacatagtggatcccatttcttccttcccagacaatgcggtcttccttcgagtacagatggatttgtgcttttccatcgatcacggaaactctgtttgcaatctctccttcggcgttgattacgattactgatttcatccggtcagactgcacgatcacctcatagacatgacagatttcattcaaatcttcccttcgttttggagtcagattttcttcatttaaaaagcgtttataaatgatccggagcggctctgtaatatgctttttctccagctgggtcaatgcaaactgttccatcttctcccgatattgtccatatagctcacttgtctcctctacatgaagaatcacatttgcatataacactgcaagcttcgtataatccagcacagatccgtgcagaaaatacagataaatagattttggcaggggttccttcgcttttttaccatgaattgtgatcatataagattcatagagttgtgcaatctttagacctgctttgaccgcccgctcataccacacaaaatattctccatccagtctgcttcccttgatcaacattgtgcagactgcatttaaaatcatcggatccggatattgttcgtaagctttcccaaggatctggtaaatgttcttatcaaatccttttaactgtgtggcaagattcgcgatatataatgccacttcctcactgagcagaccatattttgccgcaaaagaaaagacacggatttcaaatgccccaagctttttaatacattccggttgctccctataacaccggtatgcctgcaaataaaacaaaatactatttgcacctttttgatactgttcctccagacgagaaagtttctcctgtctgtcctgataaatttcatctaattccactaaaatgcacagaatctgccaggattctcggtttttcatatacattcttcgaatgtcttctaccgttttcttcgtgtatgcttcttcagcccggcagaccgcagtcaaataaaggtaatatgcgtccatctcaaatttcttactcaaagaaaatctgctgtaactatattgatctaaattctcctgggcatcctttttgtgtccttctaatacagcaagctgtgcctgtaataacagatacagatcattgtccgaatcttcctgctgtcttctctggatatatccttttgcctccttaatccacacttccttctgagcttttccggcttcacactgtaaataagaagataaaagcttgatccattcttttgcctgctctcgcctatcactgctctttgccgggttttgagaaactacaactgtatatgtcaacgtctcatagggagtgcgaataacaatctccccgtaatttttcccgccatgaagcagatcactttcaattacatattctaactgataccggtttccgacaaaatcttctgttgaaaaacgattctgtacaagacaaaggaagtcacctttcacctccacggccacttccatatatccccacgtgttttttgtaatacggattgcttcttttttagatgtctgcagatcaaaaaacgattccgtctcttctgacaatgtcagaaaaatccgttctttctgcttcgttccaactaaaaattcttccaatccctgttcatccagagaccattttctcatattgctgtacagattgctccaacgcttctcttcatattttaaaatctgataaaaatctcttgagcgaaacagcctcgctgcctccaggtaatctttctctgccagcctgcgaaagctttccatatcttgtactttcccaatagatgtcataacatacggtttttcaatgattgcagtgaacgggagctcaaattctcccccactgcatacaatcgtaaaataccccttctctatctgcccgggaagcattcctgacgcatcgtatgtgaaatgaatcttaacctgatgcccttcaaatccttgttcgctgcaatgcatgcgaaaagaagaggcatagacaagacctcttacgtctccctcttcttcgttctctattaaaaattctccatgataaactttcccctctccgatcttcattatgatcttcgtctcgggaagtcggattttcggttggatcgctcgaaaatcgccctctgagaaatgtttgattttattcttcaaatcgttcacctacttgtcgtttcttacattgctttttcttcattgcatgataataaattatagcattatcctccatgttcttgcaatgctttcatgacagacttttcagatacttttttaaagcttctcttctccctctcatcgaaccatttcccaaagagcaataatctattccacaattttatagtattcccttgcagttactgcaaaagtaatgatataaaacactacaaaaagcaatgagactgccacagtacatccaagaaacagcgttgtattggtaaatccaaatcctgccaacaactttttcaacaccttaaatgccacagtaatgtgaagaatggatgctccaagtggcagaaaaaatacaagcaatacctggcttttaatagagtctctcacttcttttttgctcatccccactttctgcataatctgataccgctcacgatcctcatatccttccgaaatctgcttatagtaaataattaaaaccgttgccatcaaaaataatattccaagataaataccaatgaacagcaagcctccaaatatagaaaacatcccttcttttccttcctgtctcgtttcataaaatcccggaattcctgatgcatcaaacgctgcacgcagttctgcaatcgctttcttgcaattttcctcagtcccctctaaattcgactgtagtgtataagaaataacagaagcctcctggatatactcctctttcattctactgtcctgatacatcgccttcaaaatgccattgattgattccatatccggcaaaatcacataataattctctgccatattttgcgtagaacttcccgcaatttttagttcttttaactgctgtatgacatgatatcttcgctctccaaaagcaagcgttcctggaagttctttcttttcattagatacatacaccagcatctcatcctgcgcaagcgatatcgacattccctccatctgattataatcttccagcggaatcaaatatacctggcatacttccatcatatcttcctgactcacctcattttccttgagaaatcgttcaccgtcaaacactgagacaaatgaaccgtaatggtattccatcgtttcgaccattttcacatcatatttcccatagacttcttctgctatttgacgcacttgtctgtcctgctcgggtgtagaaaagctagtttttatccggctctctctcggataacggctggatatgacatcatcaattcccagatacagtgatgcagttgccgaaatcataacaagcacaatcgtacttaaaatacagatatttgcaaggcctgctccattttgcttcattcggtagatcattcctgacacagagacaaaatgttttgtctgataataaaaacgcttccttcccttcaaaaatttcagaaatgcgatgctccctgcaataaataatgcatatgtgccgatgatcacacagattaccgccagaaaaaatttagggattgcttccagtggagattctgtcgtcaacgcaatacaatatccaattccaagaaatactgttcccaccaaggcaagcacccatttcgtccgcggttctttttccccttcttttcctgcccgaagtaactctgatgggtttgacagccggatctgcagcagattatagcaaagtgtcagggcaaaaatcccaaaaaacagcaccgccgtcgaaaaaactgtctccatatgaaattctgacttcatccccgtttcaaaccgtaacagtttctgcagacacaaatacatcaatttttcaaacgtaaggcccgccagtattccacctgcaatgcttacagatgctgtcacaagtgtctccattgtcagcattttagcaatgtgttgctttcccagacccaaaatattataaacaccgatctctttttttcgtcgtttcatcagaaagctattcgtgtagaacaaaaacagtaccgagaaaatcactactactgacaaagaatattctaataccctctgcaatgtcctgtcaccgactgaacttccacttgcaagtccacacaaaatgtaatacatcatcacggttacaatggcagtcagcacatacggcacataagtctttctgttgtttttcagattggtcagtgccagctttgtataaaccgatctactcaccttgttcacctcccgtagcaagaactgtcaatgtgtcagagattttctggtacatctgctcattcgacagatttccgcgatagagctgatggaaaacctccccatccttaataaagagcacccttttcgcagtacttgccgccttaatactgtgcgtcaccatcagaatcgtctgtccgttctcattaatttcatgaaacaaatccaaaagttcatctgccgatctggaatcaagcgctcctgtcggttcatctgccaagatcagctgtggttttgtgatcaatgcccttgcaactgctgcccgttgtttttgcccgccagacacctcgtaaggaaatttctttaaaagtttctcaattccaagcgatgccgcaatcggctccagtctgcgcgccatctccggatacttcttcccggagaggaccagcggaaggaaaatattgtcctgcagcgaaaaagtgtcgagcagattaaaatcttgaaaaacaaaccctaagttctgcctgcggaatgccgccatttctttctctttgattgttccaagctctcgtcctttcagaaacactttgccgctcgtcggtctgtcaagcgcagccaatatgttcaacaatgtcgtttttcccgaaccggattctcccatgattgccacgtattctcgcggttccacggaaaaattcacatttcgcaatgcttccacctgtgttcctccaaatcgggttgtataaattttctttagattatttacttccaataatgccatattcattacctcctgtctttcgatcacagtgtcattatacaaaatatccggttttctctgccatcgttttcccttacatttttcttcgctatcttacatttttgaaagaaataaaaaatctccgaacagttttctttttcctgtccggagattctttctattttcttaccaaaactatggtcatggatttttataacaagaaatattttcctacaaacagaacagcaaggatgatcatcaataaactcatcttcttttcttttgcttttcctgctacaagattgatcacaacataagtgatgactcccatagcaattccttctgaaatgctgtagaaaaacggcattgctgcgatacagataaagcaaggaagcccttctgtaaaatcagcgaaatcaatatttactacattggtcagcatatagaatccaacaacgatcagtgccggcgctgtcgcaaatgatggaatggcaaggaaaatcggtgaaagcaataacgatgctccgaataaaactgccgttgtcactgctgtcaatcctgttcttcctccttctgagacaccggaagcactttcaacaaaagtcgtcaccgtcgatgttccaagtactgcacctgctgttgtagcaaccgcatctgccatcagtgctcctttaattttcggaagctttccttcctgatcaagcataccagcctttgtcgaaacaccgatcagtgttccaagcgtatcaaaaatatctacaaacaagaatgcgaacacaacgataataaactgtccgatattaattcctgaaaaactcagttttccaaaaatcggtgcaagactcggcacgctgattcctttgctgaaatccggtaacagactaaacattccgagttctgcatttggaacatagagaccactgatctgacaaaggattccaaggatccatgtgatcagaattccccataaaatatttccctttacattttttacaacaagaattgctgtgatgatcacaccgatcactgcaagaagtaccgtgatccctacatcgttcatagatgctttcacaccattcagttcattatatccttcaatagaaaacaactgcaccaaagtagatccaccaattacaatctttgcattctgcagtccgatgaatgcgataaacagaccgattcccacactcactgctgactttaagttcagcggaattgcattaaaaatcgcctcacgcacatttgtcacagacaatacaatgaacacaagaccttctacaaaaactgctgccagcgcgatctgccagctatatcccataccaattacaactgtgtatgcaaaatatgcattcagccccattcccggagccagcgcaaatggataatttgcaaaaattgccatcaacatcgttcctaaacatgccgccaacgcagttgcagtaaacactgcaccttgatccatcccggccgccgccagaatgcttgggttgactgccagaatatatgccatcgtcataaatgttgtgattccggcaagcacttctgtcttcacagtcgtgttgttctcctttaatttaaacaacttctctaacatctctcatttcctccttaagtgtatcgatgtactttctctctcatgtgcgaacacttcctttgtgatctgccatgaccaaaaccgtacataattttatcaaagatttgtaagaaagtaaatcattcacctatcatatatactaataactatttataagccaaatatctactactctgcaacctcaaattcacgcccaaagtttaagatcactgtcgttccttttcccacttctgattcaatttcaatcaaatgtcccaattttttcataatttttttacagagatacaacccgattcctgtagactttctatcctgtctgccattgtagccggtaaagcctttctccatcactcttggcagatcttccctgctgattccgattccggtatctcgcacaatgatgctgtccccttttatctgaacaatgattttccctttttttgtgtattttaatgcattagataaaatctgctccacaacaaacactgcccaccgttcatcggtcagtacttccaccttcgatgggtgaaattccaattcgatttttttcaaaatgaacaaggaagaatatttgcggattgccttttttgcaatttcatcgagaaaatagcgctgcaggacaagatcggaggatagatttcccgcacgcagataagataataccatctccacatactgctccgtcttaaaaagttccgcttccatcgcccttcgatcgatctggtctgactgattcaaaagcttcatcgccgcaattggtgttttgatttggtgagcccacaatgtatagtaatcaaccatttcctgataattaatttccgcctctgactccagctctcttctgtatgcttccaggcggatcagcagttcctgatactggtcctcgatggattccttcgcttttggaagactgctaagttccatttgttgctgcattgaaatatcgtgaagctttccagatcgacgcacaaaatctgcaaaatcaattatcccaacaatgcacatcaaaactgcagacaaaaaagcagcatactgcacagtgtcaaccggaaccgatgacaagaaaaatacaacgaaaaaaatagttacaatcccaatatatactgcaatcacctttcggcattttttgagatatgcacctgctaatctgatcattcgataatatacccgattcctttctttgtcttgataaactcctgtacccctaactcttccagttttttccgcagacgagtcatatttacagtcagtgtattgtcatcaataaactcatcactttcccaaaggcgctgcatgatttcctcccgctttacaattgttcctgcacgctccatcagaatctgaagaatcttataatcattttttgtcagttctatcttccgattctgaaatgtcacacttgcatcactgagatttaacataagacccttgtgctccatcacacttgcactgccctgaaatgcatatgttctccgaagaagtgcctgaatcttcaccgtcagcacattgagatcaaacggctttgtcacaaaatcgtccccacccatctgaatggccataacaatattcatattgtcagacatcgatgacaaaaataagattggtacgtttgacgtcttccggatctctgtgcaccagtaaaatccattataaaacggaagtccgatatccatgagaacaagatggggcgcatactccttaaattcttttgccacctgcttaaaattctctgcgcatcgagcctgatagccccatttttccaaatgttctccgagcagtcttgcaatcgtctcatcatcctccacgatcaatatcttatacatccatttgctccccttcctttattcctccggctcattttctttttcgtaagcctgatttaaccagtcaaccgctttttccagtccttccttatcaaaagaaaaatcagcagaatgtttctcgtcgttcaaaactttttcccagcagacatccctccaccagaaagtcgcttttaaccgttcctcgccttcgactaccactttttccagacgatacctcatctttcgaaaacttcctgtaaatgctgatttttttaaaaatggaatacttacaataccgtataaatcgatcattttttgccttctttcctcaaatctctttactcatatttccaataaattgttattttttgaaatgcactctcttcccgataaaaatactctacggtagaaagaccatacaattctccaagatactgcaccatttccggaagaatttcctctcggatcttcacttctgcctgaccaaatgcgtctgctgacccaaatttcaaagctgattcactcttctgcccttccacatcttcccggagcacctggcagatctgctgtttctcatagttctcataaaatctgttatttttccgataatactcctgctcataagcatcacataccgggagtacaaccgattcttccggtatatgtgtcagaaaaagctgctcctgcggacagcaaagataatcatagacgatcgtttccatttgtgttccctctccggtccagaccggatctgcccatgtagtatctacataagaatactttccgtcgcacttcacaagattccatgcatgatcctgcgtctccccggtatccggatctgttgctgtccccgtcacataagtgacaaaaattcctaccttccctgccagatactgcattgtcttggcatatcctgcacagacagactccccattttgcagcacactataaatattctgatcgtccgttccaccttcctgatactcggtccgccagacaatctgctcataaagatatttgattttctcatattccgaaacattttcaggtatatccgcaagccattcctgtgccgcactctcgatttctttttgccggcgcatgctctcctcgctgtcatataagtattctggaaataattctattttttctgccattggatagtgtgtcatttgcagtgtgccagagcaccaaaataattcgggatgatcatttagcagaaactgataaactttccctattttttctgtatctgctcctaggatttccacagattcccggtgtaaggagactcccttcaagagactcgtataaatgcgctgctcttcctctgaaagctgccgaaaataaaagtctgacgtactttcatcctgagattcgctttgcctgtctgtttctgcggtttctttccactctgcggtaatcttaaatttgtactcatttttttccgcgccctcataattccgactcaacatccagaaacctgccgctgccagcatagtaaccaatataaacactatccaaatccatccttttcgccttttccgctttatccttcgatttcttctgtgatttctgctcatatcacaatctcctttttgcagcctccatccatattctttcaatgcactctacatatttttctgcatatagtaacagtaatcttaatcacatgaggtcttattatgaaaccaatgcatgctatgcaggcagacacaccggacaaaggaaagttaaagatccagatcaactctgaaatcacttccttcccgattgccgacgcctccatttctatctcctatacgggtgttcctgaacaaactttagaacaagtcactacagattcctccggtcagaccgaaactttagaactcgctgctcctccactggaatacagtctgaatcccacaattgaatcacagccttattctgaatacacactctccgtcaccgctcctggttttgaaccgatcaatatttccggtaccgaaattctcccggacgtcactgctatccaaaacattactatgcgcccgagcaccgctactccccaacaggaagtgtttgtcataccagcccataccctgtacggcacatatccgccaaagattgccgaagatgagatcaaaccgacagacgagaccggtgagattgtactaagccgtgttgttgtcccggaattcattgttgtacatgatggttctccgcgtgactccaccgcccaaaactattatgtaaagtacaaagattatatcaaaaatgtagcttccagtgaaatctatgcgacctggccagaaaatactatccgtgcaaatgtacttgctattatgtcatttacccttaaccgggtatatacggaatggtaccggaacaaaggatacgattttacgattacctcctccactgcatttgaccacaaatggattccggaaagaaatatttatgataccatttccgtcatcgtagatgaactatttgcaaactatctttccagaccaaatgtcagacagccgattctgacacagtattgtgacggaagacaggtaagctgcccgaattggatgaccatatagtaacagcgtgtaaacaaattttcatttttcttcatttctttatatctttatcgttcttcaaaatgattgtacttaagaattgtatcacattcttgacagaggaacaatccatgatgccctttcaaaaactctaggaatcccatatggcagatatatttatgctccctcctaagtgacaagtttttactatcttacttgtcttcctagaagggagcatatcattttgcaaatgctattttctattttttattttctacttttgtgatttgtttctcgctcttttcatggctccgtctgtctatatctgacgtccgacttcaaatccttctgccactgcatcgatcgcacgtcttgcagcttttgcatcgccaatcacatggaatggaatctgttttttctcacaggcttctgccagcaaatgggaatcattagaatgaaaaccgaccgcaaaaactgcgcagctgcacggaactactgtaccatcttctaacacgattccttcctctgtaaacttgcagactttactatttgtaagcatttttacatttaactgctgcattttcatcattactgagatctttctaaggcttccaagatcacttccaatgctgtctttcatctccaggatcgtcacctcacatccggcgctcgcaagtgtatcagcggtctccagtccaacaagacctccgccgattactgcaacctttccttctggtttcacttctcttctcagcacttccggtgcagatacatgggtaagcttatccgatccctccagctgaatctggattggggaagatccgactgcaaggatcacttcatccacatctccctttgcgatcatctctacatcaaccactgtatttttatgaactgtcaccattcgctctgtctgcgcacccatctccagtgcagctgctttcatctcaccttttcccggggcttctcctgcaaggagaaattctccgcccagtgtatctgttgcttcaaataatgtcacctggtggcctctttcatgaaggatctgagctgcttccataccggctacgcctccgccgatcacccatacttttttagtatgttctgccggatcaagtgtatattctgcctcatgtccgatcatcggatttctcatacaagtaatgtgcgggcggtttgccacatcacaaaatccatcatagcatccctgattacatccgacacagtgtacaatatcctctacatgcccttcttttgccttgtttgcaaactccggatctgcaagctgtgctcttcccatcactaccatatccactttatcatctgcaatcagctcttctgccagtgcagccgtattgattcgtccaacaccgactgtcaccataccggtttcctttcgaatccttgctgcgttctctacgttaaatgcatttggcacatcgatcggcggaacttcatacatggatgctgctgtaataatatttcccctggaaacatctagcacatcgaccccatgctcttttgcaattttacagaaacgaatcacttcctcgatgctcattccattttcaagaagatcatcctgtgcgtcgatacggataaataacggcattccttccggcattctctttctgagttcatcaattacttccagcgggaagcggcaccggttttcaaagcttcccccatattcatcttctctgtgattcagtcccgcacttaagaaagaatgcgggagatagttgtgggccagatggaattccagacagtcatatcccgccttgaccgcacgctctgccgcagcgccatagcactcgattacttctttgatttcttcttttgtgatcgctttcaatgtatacggaccaaagttcatatcggaaactacaagaatctttgcttttggatccatagatgcagcaatagatccctgccataactgaattccggcttttccgccattttcatgaatcgcatcagtcagttttttatgaccctctataaatttatcctcactgatcgatacgaaatgtgccggggcacttggagtatgtacggctgccacctccacaatattcaatccacatccgccttttgctcttgcagcatgatatgcaaccagtttttctgtcacaaatccatctgcatctgccatccttgttcccattgcaggcaggataattctattttttagttccatctcccgaatcttgatcggggcaaatacatgttcaaacatttttgacacctctgtttttttctttcattataggtcagttgaaaagaaatagatattcatatttttaactattattatcatttttttacaaacaatcgatattccgaccggtattcgctcggcgtctgattcatatatttctgaaaacttctctggaatgtcgatatacttccgaaacctacatcctgaccgatttgcgtaacacttctttctgtcgccgcaagatagctgcaagccatacgtactcggatttcttccagtaattcttgtacagttcttccaaactgctctctgctccgcttttccatttgaaatggtttcatttttaactgctgtgccatctcttccatctgaaatggtttatgaaaacacaatagtaaatattgcaaaacctgaagtgcctcttcttctcccctcatgccaactcctgccccgatatgttgtgtctgatactctctcacactcattttcatgtatcgcttaaacaccctgcaaaagtcttccagatttgtaaatccaaggtaatcgctgatatactgcagatccagatccggaaaatgcaacagtgcacaggcgtggaaaacctttcccattttctgtagctgaaaaaacgtatacccacaattcttcgtaatatgccggttcaatgtcaccgctgtcatccctgctgcctttgcatactcctcaagagaaagtgtcttgcttgtatcaagcagtaccctttggatcacactccaaatctgcgatgcacctccggataacgactctcttttttccatcgcataccgacaatataatgcatgaagttccatcgcaagatagatgctgatgttttgactcccgaacctctgcgtctcttcttccaaaagcagttctgcaaaaatcgtttcgacacgcttctgttcttccatatttaaatagagtagcggctccacccgatagatcaacatttcattttcccatacttccctcttttcaaagcagaggaacataaaaagtccgatatagaaagagactttcacacaatcgagtggctcctcaatctcatcaatccgataaaacagatgcatatacagacagagtaaactcccttgtctgactttaaatttttccccgttgacccagattgtggcctttccgcttctgacataataaatttctgtccgctcgtgaaacacctgttccacaggatttattatacaaagctcctgaacagaaatctgccgctccctgaaattataataatcacttccggtgaaccaatctttctgataccacatacgcgttttcctctcttttcacaattcttttccctgtttttgcatcttattcgcttttatctatctgactgctgtcttttacaagttctataaatttctgcatctcctgcgtcacccacttacttttgtgataaagcagctggctgtacatcaccacagtcgggaggtctgtcctcacttccaaaagctgttctcttttcagttcttttttcacggtaaattctggaagaaatgaatatcccattcccttttgtaacaagtggatgattgtctctgtatttccgatctccagaaccggcagaatctccagatcccgctccgatagcagacgttccagttcatactgataggcagcaccggactctgtcaatagaaaggcttttgttaccagttcccttgccggtacctctgcttttctgtcagaaatctgccctgccggtgccacaaaaagaatcctctcttttttctgtaccgccccacaccactctgcatgacatatttttcgatccagagtaaagacaagatcaatctcattgctttttgccatctccatcagttcctgggttgttcctgattttatgataatcttcacttttggatactgtgcataaaaagaacacagcaaatctggcaaaagcgcagtgcagacggattctacccctccgatccgcaacgtcccgtccaattcccgttgatcttttgcaaagaaacgtgcctgatcagtcacccgcatgatctcatttgcataggaggtaaactccatcccacgctctgtcagcgacacacgcttcccaatccgttcaaacaacggcgtccctaattctttctccagctgacggatttgcacagtcactgctgactgtgaatatccaagctgctctgccgccttggaaaaattttgggtcgccgccacctttaaaaatgtattgatatttcttaattccatgatttttccctcataccggtagtttttcttatgaattgttttcatatatcttataaaatttatgaattttacggatagttaaaagtagtatacaataaaatcacgcagacgtaaagttttgcctgatcgctatacaacgatgacagcagtatccctgtcaagatctgctccatctatttttgattttagaaaggaagtatcatttatgctgaacagtgaaaatgttttaaatagcgcacaattggaagaagcaatcaagaaatttgtacatacgttttgtcaagaaaaacacgatatccattctcaaaaagtgacctggtataccgacgagacacagtcagaaaaaatcagacagattggatttccaaaggacggaagacctgtggatgaggtcgtcgcagagatgtcagaggaagtctatcgttaccgcggagatgccaaccatccaaggttcttcggattcgtaccgggaccagcctcttccatctcctggcttggggatattatgacttctgcctataatatccatgccggcggcagcaaactggccccgatggtcaactgtatcgagcaggaagtgctccactggctctgcgaacaggttggctttacagaaaaccctggaggtgtctttgtcagcggtggctccatggcaaatatcaccgcactgaccgctgctcgcgaccacaaactaacagatgagacgatgcacctcggagttgcttatctctctgatcagacacacagctctgttgcaaaaggattgcgaatcatcggaatcccagacagccgaatccgaaagattccgacaaacagcgatttccagatgagaacagaagaactggaggcacagattcagacggatatacaaaatggcctgatcccatttgttgtcatcggaactgccggaacaacaaataccggaagtattgatccactggaagagattgccgcaatctgttcgaactacaaattatggttccatatcgatggtgcctacggcgcttcgatccttttaagtccaaagtaccgccatctgttaaaaggaacctcgcttgctgacagtatcagttgggatgcacataaatggctgttccagacttacggctgtgcgatggtacttgtcaaagatatccgccatctattccacagcttccatgtaaatccggaatatttaaaggatattgaaagcgatgcaactcacatcaatacatgggatatcggaatggaactgacacgccctgcccgtggcttaaaattgtggctcacactgcaggtgctcggaacagatctaattggaagtgcgatcgaacatggttttgacctcgctgtctgggcagaagaggcactaagagatcttgaccactgggaaatcgtgtccaaagcgcagcttgcgatggtcaatttccgctatacctccgaagatctgactgaggaagagaccgatcttctcaatgaaaaagtttctgaaaaaattcttgcaagtggttatgccgctatttttacaaccgtcttaaacggcaaaaaagtactgcggatctgcgcactgcatccagagacaacaagggatgatatgcgcacgaccatccatatgcttgacacctttgcaagggagatacactcttccataaaaaaagaacgactgccagaaaaaataaactcataataaaaacctgccgcaggataagctttcacgtctctctttttagagaatttccatgaaaacttgtcctgcggcaggttttatcctttattgatcttgtgttttgtgctctattcttattgaaaaaacttttggaagaaattctatatccatatttctacaacagatactcatagattgcttttgctaccccatcctcatcattgctcgttgtgactgtcttcgcaatttgcttaagttcctccttcgcatttcccatcgctaccggaaaaccgaccctctccaacattgagaaatcatttgcattgtcaccaatcgccatcacctgtaaaagtgatatgcccaatgaatcgcaaagagcttccagcgccttccccttatttgcctctgcctgcgtgatctcaatgtatccacttgtcgaaacagccatctccaatgtcacaaatcgttccagcatttcctgcagcaccagaagttttttctcatctttggaaaacacctggatcttttctaccggtttctcattttcccgcacccactcatacagatctttctgtaccctatgcgctttaaaatctctatgatatgctacatagcggtatgctgcctgcaggaaagaattatcatagcacttcccttcctggtggatcgcaattccaatttcttcctcctgacactttttcaagatcgcacaggcggtctgatttgggatcagcctgcggtaaagaatcctctgctccttaaaatcatatgcttttgccccgttggaagtgatgaaatactccacaccatccatccgacgaatctttgcaggaagtccttccaggcatctgccagtaacaggaacaaccaggattcctttctgaatcgcaagttccagggccagcttcgtctgctctgtcatctgatgtctgctgtttacgacagtttcatccatatctactgccaataatttgatttccatatccataccctctttcttcttttaattttctatttcctttttcttccaaaacggaagcaaacctaacaatgctccacctgccgccggcaacatccagccaagatgcagttcataaagcggaagctttttcgcccattccgtcagcatccccagctcaattcccacaccttccatcgcattgataaatgcgataccaaatgcaacaaccatactaaaaatatagaccatctttcttctccctatccatttgtgtccaaaggatagaacgatcaacacaatcagtaccgggtagatcatcatcagcaccggctgagaaatggtaatcatgtaagacagccctacattgctgactgcaaaactgaacagacagacaattgccgtgattcttcggtacgagagctgcggaatcaactcgtgaaaataattggcaaaagatgtcgtaagcccgattgccgtcgtcatacatgccaaaaatactgacattccaagtacaatcccacctgccggaccaatcagatcacttgccactgcatgaagaagtgctccaccatttgcaaaaacagtctgcgtcgttgcaccgatgtatgccagcatatagtaaatcccacttaagatcaataccgcacccattcctgaaaaaatcgtatattttacaatgctttttcgttctctcaccccaaatccagtaactgcattaataatgatgatcgcaaatacaggccctgccggaccgtccaacgcattataaccttctatcatccctttaaagaacgcaatgtcctgatattctccggtcgactgaaccgctccatactgtatgacattacccgatttatctgcaaacagacatacaaaatacaacacggtaatgctgagaatcaagattggagtcatatactgtccgataatatcaacaatctttttcggatttccactgaaataataagtcagcgaaaaaaataccgccgtcacaagcagagaaaccaaccacacatattcttgcggaatatacgggcggattgccagttcatacgatacacttccggttcttggaagtgcaaagagcggtccgatcaacaaatatactgtcactgacaaacatagtgaaaatcttctactgaccagatttcctaaatctgtgatcctatttccaagtaaaacaactgcaacaatcccaagcagagcgatccctgcatctgtcagaataaaccccgcaagtgcctgcaaataattttctcccgcaagctgtcccatcgccggcggaaagatcatattgcccgctccaaaaaaaatagcaaacaaagtcaaggtcaatgacgatatttgcttcagattcaatttttccatatatcttactctcctgtttcctcttctcttttccgattctaaatccgaaaattgtttctaaaatatcatcaaatctgatatttgtcaactgttagccacttcgtttattctcttcaagataatcatacctcatataaaataactgttgccacacttttctgaaactgttatgataaagaccgaaagaaatgacgatgaatttcacaataagaaaggacaaccaatgaaaaagacaacctggaaagtacaagacctcactttatgtgcactttttactgcactgactgcaatcggcgcatttattcaaattaatatccccgtagaacccattccgatgcactttacactgcaatttttctttgcactgctggcaggatttttgctcgggggaaaacttggcagtttaagtatcggcatctatctgatgattggactttgtggtgttccgatcttcgcatccggtggcggaccatcctacctgttaaaaccaacttttggatttttgctcggatttttcttggctgcaggtgttgttggaatgctgaccgaccgatttgccccgaagcggtttctcacttacttttttatttccatggcagggctctttgtgatgtacttatccggcaacctctatttctactttgtcagcaactacatcgcacacattaccgtatcgtggaaaattgttctgatcaactgcttccttttaactgtagccggagattttgtcctgtgtgtgctatcagcaattgctgcgcagcggctgaccattattatgagaaaaattttacattaaatccattcaggctgaggtatcattcctcagctttttctctgagaaattcctaaattagtttttgtctcttttttccttataatcgaagaatatacttataggcattttcccctggatgaatataatatcccttctctattccatctaattcataaccacaatcttcaaaaactttttgcattgccttattagactctcttgtttctccgcaaaaatatttcacttcaccttggcccatttcttttgtgacatgatccaataattgatgggcaagtccttgctttctcttatccggatgaattgcaaggctcataatctttacataatctttttctccactccaattgtaaacaaaaatttgccctacgattttttcgctatccaataacgcgtaataaattgcctgctcgtcttctaataaactgcgccagtctctttcttcccaaaaatctgtcggaaaacaaagttgatcaaactccatcatctctttaatccattttacatttaattttcttagtgtcatcggcatttttctccactcacattatgtaatatcaatttgcacaatctcactatttgttccaattcttatcggcatttggaaatatccagcacccgaagaaacaatgctgtgtgtcttgttcgttttagaatatccgtaaaatccctgctttccataagaccattttgtaaataaattcgcaggaaaaaactgtcctttatgtgtatgtccgcatactactagatctatgttgttttgaatcccatctgcaattcccaccggattgtgatccatcaatattttaggcttatctgaacaaattttctgcacaatttctgtaagggccttacgttttggatttgaatttatatcatcacgcccgataattataaaatcttctgtctctatggtttcatcgacaagcaatctgaatttgtttgatctatgatttttctcagctgccttttgtttacaaacgttcccgtatggatatcactcaaaaaagcaaccttaacaggatttttcctatcttccaacggaatcgcataatgctttatataaatgtgattcgcatgcaaaaatccatatgcagtcaataaaacagagactatgattgccaaaatatatactttactatcagagaaatggataaacattcctataaaatcctctgccagaagacaaaggaccaaatttagcaaaaaactcaaaaccacactgcataactcgtaaaaacttcttgtctttttaatcttccttttactggtatgatacaaaagcatcttcatgatcttgttgaattctttaaaaacagcgtattttatgactcccctcgatgtctttctacccatgcttcaaaatcctcaatcaccgcttcttttggatctctttcataccagttttctgtataaggattcattcccattggtactccttgatattgcagtatctgttccaactgtgcaaaggcatcttccacttttttccgctgttttctaatcttcctttcatcctgcccttctaaaagacttgtaaaatatccaagccactccccgatagcatcgcgcagagcgcctgtcgactgcacatagagagcctcccctttggctatgagatactgattttcctccttttcttttggatgtattttcagcttttcaaacacttttaacttcgcctctttttcagcttcggtcatggaaccatcctccttttggatgaccatcgtctgtctctgaccggtctccggcgtatgtaactgtacttccaaaagaccattaatatcgtaggtaaaccggatatcaatataaacctctcccgccctttttggaggaacatgaaatttgatctgtccgagaggcagattctcatctgcgtagtaattttccccctgatagacattgacgacaacctctgtctgattgtcatgggaagtatagtaccgtttttctctgctggcaggaagagaagtattccgctcaattagtatgctcatcatatctctgtcgcttccatcatgattccgaacgccgactccaagcgaaaacggacagatatctgtcagaagcatatctttgatttcatcgtcccgctctttgatcccgacgacaacaccaagcccccgcgcaatcatcctgtccggatcgcacatctcaatctttcttccttccaaaatatagcttaaatactgctttacaatctccattttgcaggaaccgcccacaagaacgacctctgtcagttcttttggcgaaacctttccatctagcaggacacgcttcaccggtttctccatccttcggaaaatctctgctccaatatgcactacatcttgtctggtcagactcagatcccatgactgctcctcatatcttacccgcatcactgcatctttcgcagctgtcagttccatcttgcatcgctccgccgcttttatgagcactgctcttaacttttcatccagtgaatcccacaacagattctgtttctcgcagaaatattttgcgatcacactgtcaaaatcacttcctccaagatgattgtccccgctgaccgcctcaatctgaacaacattgtcaaaacattctacaagggagacatctaaagttcctcctccaaaatcgaagacaagaattgtagcatcttcccgctgttctatattttgacaggcaagcgctgctgcagatggctcgttgatgatacgctctacccgtagtcctgccagctccccggcacgctttgtggcagctctcgctttatcgttaaaatatgccggaacacttatgattgcctcaccgacttcttcctgcaaaaattcctccgcatcttctttcatcttctttaacaaaaatgcagaaagttcttccggacgaaacagtcgaccgccgagggaaaactgcttatccgtccccatatatcgcttaaatacacttgccgtctcatcaggatgtgcgatcatccgctcctttgccgtctttcctatataaatccgatctccatccacgctcacaaagctcggtgtcagatattccccgctgctgtccgggatcagcacactctccccattctgccacacggctgccagacagttcgttgtccctaagtcaattccaatcgttctcattttcctccaccctttctctcatagacttcctcaatcagttgataggcttcttctttttttgtttctgcttctgctcccgtcacaataattccttccagtgcagagacctttccttttttataaagcatcgtcaccggcatccgttcttccggaaggtacaatgccacttctagctctatactgtatttttcttgcagctgccaaagcgctgcctcataccggtcaaactcttctgccctcgtcggcatcacattcacatagtcttccaatgttgtccccacagaatctgtcagacagaatacaaaatagccattacaatatcttgtattctgattttctccggcaaatgcctccatcatctgatcacttcccggcttcgtcaaacgatactgtttctcctgcttccagaagctttctagatcctgctcaaattttgtgtgatatccggtctgtcccagccacggcacctgcagtttcccataggtactgttgatctctgccacttctgttttcacaaatgcttcctcacttccagttactgccacaacttccgcctgcatggctgcttccactgcttctgcttgcagagtatcaaagtatttctccccattttcatctttccataaccacgcaaatgcttcctcggtccctttctttcgcagttctacacccatgtaagtatgatcccatcccgaaaccgaagaaacatagacatgatattccggaacactaacttcaatacctgcatatttttccgtaagatacgttaacagcgactgttccccttccttctccagttcctcttttgccagctgaaggtcacgttcggcagactttgtatcctcgatcagcttatctgccgcatccatagtttctgccagctcttttctctgctgatcccatgtttcactgtcctccctcgttcttggaagaatcaggaatgcaagcagactaaatactgccactagcagatagatcatttttcggatgtttccaatgtgcttctgaggtttctttttccctgtcgggggaagttcccttgctgcttccagtgcacgtgcaactctgttcagtgtctgattcagttgctccagatgttccggaatatacccggaggactgtagtttctcctccagctcttgtctggtcaacgcaatctgtcgacagatgatgtgaaatgacttttctgaaacattccgttcggcaaaaattcctccacaaagttcccataacactggctgaaattgattttcccgaaaaactgcagactgaaaaaatacattccacaacactgcttcctgttccggtgcctctcttaacggttccaaaaaggttagaagctcctgcaagatgcggtcctgctcttcttcctgaactttctccagttttgaaagaatatgctcaaaatcaaaagcagtttcctcttcctcgatatcctttgacttttccagggaaatcgcctccggaacgctttccggcacagtatctttttccatacagtctttttctatatattctttttctgtgcttacttctaccgcagtcttttgctctgtgttttcttcccaaacaacaatagaatcagcttctgctctgttctccaagccactgaaagaatcactttttttctgctcttcttcctctgtccaagcatcttccccgattgcggaagcaaactgtattgctgcttcgtatgcttcgtggatttcctgccatttctccgggtattcttccgggtggtagcgcgctgctagttttgcatacacctttttgatctgttttttatctgaagttggctcaatgccaagtactttaaacggatctctcatgctccttctcctgctcctcctcaacacgcatcattttcatgcgccgaaaataagaactcatctcgtctgccatcccggaaagccggttcagcaatgtagagaaatcatttaacataatatcatctttgaaatatggatacacaatatcatggtcaatctcactccacccttcctcaaagagcgttcttccctgaatctccacataatgccctttatatttgataatatagtgcaaggaacggtaaattcccccggaacggatctcaatcagctgatcatcgtaaattcgactgtctcccgcccgcttatacacttttggccgctctgcaatataatagtgatccgcatcctcatcaaaatcttccagacgattttccacatactgggcaggatcattttcaaacaccgacgtgatatattgatgaaaatgaatccagtcctcacggtagaggaagaacacgcggataccgatcaaatctgtaaaatatttgtgaaaattccagcggtcgatccggtcaaacttccggaaattttctcttcgtttccggataatcttctccagaagatgtcccggttccttcgttcggtagcggtaagaatgaatccccgccttctggatgtcatagaggtattcatctacaaaatcttttccgatctcccggagcgtcgtctccatagactggtaattctcatagattgctgtcagttcttcccaactgatctttgcctcctcaaaatcctgctctgaaattctgtatttctgaagaaattctttcttatctaacattctactcctctcttgtgcatgaagatgctgcacgcttatttcatttgcagcaccttccctgcatctattctgttaaaacagtgttgcctgctcatattccatttttacatactcagcttcttctacatcgatcttgctgcgataatctacaataacggtctgctgtttttgtccgaccatcttctgcccgagcagatagttgacatcaaatttgccgatgatcgcaggtgtcgcacctcttgtcggcacgatcagctgcacccgatttgctgcaagcatcgcaaagattggttcccagatatatgtatccttcgccgcaccaaatggattgtcgatgaagattactttttttagagactcctcatttgcatggtaggaatgaatacttgcaatgtaattgatgattgcgatcaaaaactggatgtagattccctgcgactgtccggtacttccaactgcctcctcgtatcttaggtggcgactctgttctttgatccgctctcttttgtaaagttccagactgatacggttcatatctgtgacgattgccgagaacattcgcttcatcgacagttcttgaatgagatattttttcttttcctgctcggtctcgtattttttcaggttttcaatcacttgtccaagataattggaaatctgcatttgctgctgttcttctctcacatatggaatcttcaaccggacgatctgcgtcagtttctcatcgatcataatactgctgagtttcggaaacttatccagttccatgcggatcgtattgcaccgctgtaaacattgattttcaaaactacttttaatcttctcgatatcacgaaggctttcctcaatctgatctcttcccatttggatcatcacacatgcttcttccaaccgcttaatcgtcttatctgcctcctcaaaactttgcggaaccgggatctgttctttcatctgcagtgcaaaacttcctgcgccaagtccggtcagcgtctcttcacaccacgcctttgccttgccaaatgcagtttctgccgctgtttttctcgctttcatcttctgccatccactcatgatctgacgctcggtttctttccagtctaagataacaaatcctggaagtgtcttgacggacatatctttgatgtgatactcttctgcaacccatgtaatctttccgatcatcgtctggatttcttcctgcgcttttccagtttccttctgtttccggaacaattctgccagttctctcttgcactgctgttgtagctctttctgccgttccttctctatctcgatcgtccctgctgcaatcgggagccgctcgattcggtagaatctctccctgatctgcccggcgatcacatctgcctgtgactggaatcgcgtacatgcaagtaccagctccgatacttttttctcacatctttgtaatagcttctcttcctccatcagatgttctttctgcgcctcaatctcttcgtcggacacttccgcaagtttctgctcctcatagagctgttccagcatctttacatctgcctttctgcttcttaattctcgcagacaggacgtaatctgttcccgtatgacctgaagtgtctcgcttttttctcttacatctttattttccttttcaaatgctgcgatggcaccatccaactcttcctccagacgttccggaatcggttcttggatcggaatctcttctttataataggcagcatatctctcccatcccatcttccgttccataatctgtgccgtaatctgccggattcgtccgtctgcctcagaaatctcccgctcttttgcttgtaccagtctccaaagtgtttccttttccagttccagctctgctttcttttccttccactccctttgatttgcttccacaagatctgactttctaaatgtgtcctccagcctttgcaaggacaggatctcctctgccagtttcttaatctttgctgcactttcaggaatctttctctccagctctgcagctcttgcacacagtttcttttccttctcttttaactgttcctgtgcctccatcacctgtgctcttttttcttttctctcctgctgttcttccagccaaccggcatagttttcgaaatagtttgtcacatactcttgcacgccatctgtgtccgctgtcagcactttctgttgttctctcaactgttcctgctttttatgttccagattcaatacttcttctgtccggtgtatttctttttccagctgctctttttccagaaaatacgcagtttcttttcctgcaaacatcactccgtcccctgcatcaaactgtccatgctccagatatgtctgatccacgaccgggatcatccagcttacattctgccactcttccggttttggttctgcaaggatcttctcgtagatccggtgcccgacgacaatgctgtacggcaagtatggaatccggccgagcacctcttcctttttctccccctgcatctgctctaacaactctgtgccaagcactccatccccgtattttcggtaaagaaactctttcagctgctctgcttccggagttacctggaataaaattcctttttgaagctgctccagctgtttttgcagttctgactgacggttctgtccgtcatggagcaaaatgatcgtctcccgctgtttctcctttaacaactccagtaaccggtagacatctttctcgccatatacttccattctctgtgctactttttctgtcagctcctcatagattgccagctgtgcctgacattcctcctcttttgtatgcaattcctttgcctcatgctccagatccttagccatcagcctgtctgactgaagctgttcttttatcgtctcacactcttgttccagcgttctcttcgactctcgctcggcatcctcttccttttctttttctatgatcgaatccttaatctgctcccggagaagaaatgggaatgctttcatcccctcgccgatttctttttgcagagcggtgcgctctttctcattttctataagacggctttctaatacagcgcgggcattatcgctttcccgctcctttttatctgcctcttccttttctcttctggaagtctctcgatttttctcagcctcatctttctgcctattaagctgttcaaaaatctgctcatcttttctttttttctgggcagtcatctccagtaaagactggtagagttcctcattcccctgcttcatccgctccatctctgcctcgatagtatgtgcccgcgactgtgcttttgcgtaattaagaaaatattggacagactctttctctgtcacagtctgtcttaattcttcgactgcctctttcaactgctctttctgcttttccttctgttctctttcataattggcttcatcaagatgacattccagttcctgcagatctaaagtcaacaagattcgctccgtttcctgctgttgttcctgcatgttctgcagcgcttcctccaattgctccgcttctgcctcaatccgctctctttcatcaaggagggtatgataaaatacgcttgtcttctgctcattttccctgcacagttcaaagttctgtaacaatggttcaaactttgtcagaaactcttgaatcaccgtaatctgcctgtcgtaattagaaatctgctcctttttctttgacagttctaccatctgttcccggatatccaacagtgtctgtgccagttcttcagcatccttttccttaccagtctgaagctggtatgccttttgaataatctcctcgatcaaaagatcctctactacttttctgcttgtcctataattgctctcaaaataagtacgaacatgaccttccgtcttattgatcccgcggataatgttccactgactctcatataatccatggcctgcaatgaaactttgatattcacttttggaattttcaaaaattttcactgaaagcttccggtttgattcggcctgaagccgtttgatgatttcttttagccctttaaaggtaatccgctcttttccatttacaagaggaagatttaaaatatcataatcattaaactcattataaaaaatacagtagttaaaatattcaatcgccgaagatgagacttcctcctccccctctttgatccgatctgccttctttcgtgcacagaatccagtcgtcataaaccgaaatccacactcttcctgatccggcctgtcaaggtcccactcgatcaaagagtggatgacactgctcccggtgcttccccgaaacaacttttctaccggctgtttgtcatccagtgtacagtttgggatcagattctgtaaaagcagaagcatcagaacactcttcccccctccatttgccagatcataaaggctgtttttcccttgaaaccgaaggcacaagtcgtcataaaactgagttcccacgttatatttgatgttgtttacccggattctgttaatatgcggcatcgtctctacctcctgtcataatctcataaatacgactctgctccgactcaaaataactctcgatcagcgccgaaaaacggtctgtcggataatatcgatcctccacttccagaaacaatccttgacggatcagaaattgaaatgtcttctttaccattcctgcccgggaacctttttctgcacggatcacggaactatcctcattggtgagaagtggcaaatcccaggcaagcgccatctgctcaaaactgtattcctccacctctgtcagtgcaagcgtctccactttctccgccaacccttgaaaagaagcatctactgcttccacaatttccggaaccttgacatactcctgataagtataagtcgctgaatctgtataaaattttgtgataatgtgataaataatgaagtagcaaaggaacaactcccgattgagtcgaagtccgatcatctcctttagttcttcattcgtatatccaaaaacatgattcgattctcccggtgtcagatacaaccctccccggtaatcataaatctccagattcagcgcctttgtaatcttatttaccgtatcaaatatgtctccattctgcgtatatgcctcatagagcttcgtatgttcgccctgatattttactgcctcctgattgatcagtctggcaaaaatctcaatccctgtttccagcgtctgctctgtcatctccattcatcctttccactcttatattcgtcaccgaaaaacattcgagaaaagtaactggttcctcatccgtcagtgtttccagacaaaaatccatctgcaactcttcctcggtgccttctatttcaaaatattgtttcaaaactgcctcaaaatttgtcgccgggtgtcttactgcatcccgaattacaatctcatgcttctggcacagattgacgaggaacgaataataatctccatttgcaaaaatcttctgtccataccgtacctctaattgctcattccactcccgcagcgtgaaacagtctgttttcttcaacatcgcaaacaattcccgcacaaggatccggtaattgctgctgatccgctgttcttccagttcgtcatcatagacataatccgcctcttcctctgactcgatctcctcacgttcctcatccataccgcggcgtaatgccagcatttcatccagccgcttcagatcaaacatcttcttctttttcgcctgaaacaagggctccgcaagcaatttcaattgttccacatcatcttttttaagggccgtctcaagaaactgacggaaatagacaaccggacgaatcgcgtttaatgtcccctgttctaccatactgtcgacttttctcctcaaatccatacactcactcaataactctgaatgcatcgccatcgcccgcttcagttcgctatccagcaaaaagatctcttctttatttttgatctgatcaaccggagatagcatggacattgccccggcaatcagcctcgtatttttcataaacagatcgtgttcctcatcaaaccagcagacactctcctgaaaaaattcccggtagagagaaagtccgtttttcaaatcatgcacaagtacctgcagtacttctctcttctgcattttcagtttgagtacctcattgcagattcgctttacaatctcacgaccgcctttgaagttctgggtgcggatcatcttctccaaaagaagctgctgtatactaatcttgctttcttctttgaactcttttgtattcagataaaattcaatcccactctccgtaatgtaataataaatatttccttcttgaaaatgacttttcatcagccatactctggcaaccttccggatcttctcctctggatcataaaattcataggagaacggctttccgtcattttttatcttatcaaacacataccctgcaagctgagcatactcttccggtgtacagtccagtgcaaactcactctccaaaaacggaatgacaaaatttaaatagtccgtataagttactccggtattgttaaaattattttcttcgatcaacattctaagcactgccatcaacacatatcctatgtcaatcgacttgtattttccattttgaaactgcttcagatcatgactgacaatctcaaaaaatggataatattttttcatactctccatccgaagcccttgttccgcccggatctcctcaagcaaatttctatgtaactccattacttctgattctccttgtagtattttccacctctgcttccccgacaagaatcagtgcttcctgcgggatatagcacagatctttcaacatcattctctgcaaaaaatctgctgtctctgtatcaaattcctgaagggcagatggtagtacctcccgcgcccgattctgaatcttccctctgattttcccgggctttctctcacttcctctgactgcctctaaaatcttctcataaaactccaccttcagccggatcgaatacgatgcatactgtgtttttaattcataataaatcgcaaacccttcgggatcgatatctccaaaatattctatggtatctgtctccattataccagtttcttctgcgagagaaaaggctcttataatcttccacccctccccgtaaatcacacaatcatattcctttccatatattccgttcttgatccgaaaatacgtatctttattttctacaatcaaaattttcctgatattcttttcaaaaaaagaggggcgcacctgacaaataaatggctctttcgtatagaaagcatgtagatccgtctctatgtcaaatcccatccgatttaacagatgcgtgtaagctccggcctttttcctgtgccttcccccaccatccttttccgtactcatttcctgctcatctgacgcttgcttctctttttctccctccggctgttcgaatgctttctcatccccgaacaggtaatagccaagttcatttgcagtcatccatactttctctatcctgcaatagtagttatagagtatatcaatcgcttcccgatcctgctcaaacgctctccggtttctcttataaaattcaagcaccttcgttcccacatatgaatgcaaaagagcaagatattccggatcttccaccactttttctttattgccgacaatctcataccgttcatagaccgtcgccagatatcctggtttcttacttcttttcaccggacttaacactccctcctgaacaaacacttccaaaagctgctgaaactccctcactctcccggttctgatctccaagagctttctctcttcgtttcccgctgcctgctcaagcaattcctcataggtgacacggatattccctgtttttttcttctccctgcgctctgcaaaataccgttccagattctttctcatcctctttgccccctcactttttcgtactccaatcatatcatatcctattttgaatttcatccgatttctaacttgtacattagatttaagtttgttataattttcgtataaacaaaagcaaagagaggtagtcattatgaaatgcccacactgtggtaaggagcttgccatcagtaaaaaagacagctcctacggcttatgccatacttgcaaaaaaagatataaacttccgtcacaacagcagacgtattccaatattccaccaaagcatattcgtgaaaaatccgagcgcaccattcgcgagaattatcggaatatgcttgagattgaggacgaagaagatgtttccgagacaaaggacaaagtcattcttactatcatgatcattctgtttcttctcattatcgccgtggcagcatatatttttctgtttttcaaataagttttcagacagcaaaaaggattgcagcatctactatttcgatgcctgcaatcctttctattactgtgttcctacaaaagttcactgctctttcttaaatttttatactcagctacggaacggtcaaaacctttgatatgtttgtaaagccactgaatcacatttctatttacctgctctacaaactcttctgtcggtccttcctgctcctctaacatctcgtgaagttcgtctactacacgatataattcctggtgctgctttttgtgctcctcgattcccggatattcaatttcctcctgcagcttttcctctgcattaaaatgaaattctgtgtactccgcaaggtaatctaacatcttgatcgctgcaacctttccaccgtctttctcacaactctctacaagtgaattaatctttgcgatcaactctttgtgctgggaatcgatcatctcatttcctgttactaaactttcatcaaattctgcatacatcgttgtaatgcctcctttttctatttgtcacatcgccacagataaaattcttctgcaacgcttcacttgtgatacagtataacataatttttctgaaaaatcaccttaaatcactgcaaaaaccggcttttcttttttatttttctcaattgcctcttccactttccgaagcatcttctcccggtcctccggaaaggttcctctcacacggaactgtacaaaatcatggaaaccatcatactttaacccatccacctgcaaatgttccaaaaggcatttttcctccatcaaattttccagctcatctgccggcaaaaaatttccctgctcgatgtcacggtataacggtgcctcctgatgcaaaaacattgaaaaattaattacatgcctcggtcttgtcacatttaaaaactccgccgtcttctctgcattttctgtccccctgcctcttcccgcaactccagtcataatatgggcatcatagatcattcccgcacgtttaatcctatcaatcgctgtatatgcttcctccagcgtatgatctttatgcatccattccagcacatctggaagtccgctctcgattccaagatacaaatgccgcactccagcttcccatagcttcttcaattctacatcgctcttctcctgaatatttgtcacggtagcatccatattcacctccgtgacatccggaaaatactcacgaaccagtttcaaaatcttaagaagcctctccgtcttcattccaaatgcatttccatccccaagaaacactctcctcggccttccattcagcccttttactctttgcaattcctcctcaatctgtgcaatcggcaattcccgatactgtaaatgtttaaaaagtgtgcaaaacttacatgcgttataagagcacccgaccgcgaccgggagcatataagatccccgctccatcggcgccctgcaaatttgtccttcatactgcattctgccacctcccattgtatcttttgctttttcttccattttagcaccgtttttcacgattgcaaatttcttttccatttgttcatcattttcttgttttttcatcacaattttgtcacatttcctttgtatgatagtaatcaaacaaaggacaacaccttttttatatagataaaactttttctttttcataacatgccggtctatgaccggcatttcctccgttagggggttagaaaggaacatcttaccttacacctcaaactcctctcctgcctctttggcaaaacaaaagagagtttgtttccaagctcccttaacaacattttctcatttttcatttacccactttttatactcttcccaatctttcttattaagtataatttcagaataataaaaatctttatttcgtataatagtccaaattttctttagcttctttataaatcctgcctgctccttataccagttatagaaaaattaaatataaaaaaagaaaatgctatgccggaaattatcccaatatagcattttcttttatttaaatttgtgtattgctgtttcttagaactttccgttctcagctgcttcctgaatgcttacagcaacagcaactgtcataccaaccattgggttgttacctgctccgatcagtcccatcatttctacgtgtgcaggaacagatgaagatccggcaaactgagcatcagagtgcatacgtcccatagtatctgtcataccgtaagaagcaggaccagcagccatgttatctgggtgaagtgtacgtcctgtaccaccaccagaagctactgagaaatatttcttaccttgttcgatacattcttttttgtatgtacctgctactgggtgctggaaacgtgtcgggtttgttgagttacctgtaatagatacgtcaacaccttctttgtgcatgattgcaacaccttctgttacgtcatttgctccgtagcagtttactttggaacgaagtccgtcagagtaagattttctgaatacttcttttacttctcctgtatggtaatccatctctgtctcaacgtatgtaaatccgttgattcttgagatgatctgtgctgcatcttttccaagaccatttaagataactcttaatggtttcttacgaactttgtttgctttctcagcgataccgattgcaccttcagcagctgcgaaagattcgtgtcctgcaagaaatgcgaaacaatctgtatcttcttccagtaacatctttcctaagttaccatgtcctaaacctactttacgctggtcagcaacagaacctgggatacagaaagcctgaagaccttctccgattgcagcagcagcgtcagcagcttttctgcagtcttttttgattgcgattgcagcacctacgatgtaagcccagcatgcattttcaaaacagatcggctgaattccttttacctgatcgtaaacatttaatccagcgtcttttgtaattttttcagcttcttcgatagaagcgataccatagctgttcaatacgctattgatcttgtcaatacgtctttcatatgattcaaataaagccattttctacgtcctcctgatttttctctatttactaacgaagcagactattcagctcttgggtcgatgatcttcactgcatcatccacacgtccatactgtccttttgctttttcccatgctgtgttagggtcatcaccttttttgataaaatctgttaattttccgaggcttacgaattggtaaccaatgatttcattgtcagcatctaaagcgatacctgttacatatccttctgccatttcaagataacgaggaccttttgctaatgtaccgtacattgtaccaacctgagaacgaagtccttttcctaagtcttcaagaccagcacctactggaagtccatcttctgagaatgcactctgagttcttccgtatacgatctgtaagaaaagttctctcatagctgtattgattgcatcacagactaagtctgtgttaagtgcttctaaaattgtctttcccggaaggatctcagaagccatcgctgctgagtgagtcattcctgaacatccgattgtctctactaatgcttcttgaataataccgtcttttacattcaatgtcagcttacaggctccctgctgtggtgcacaccagcccacaccatgtgttaatccggaaatatcttttacttcctttgcctgtacccattttgcttcttctgggattggagctggtccgtgattaacgccctgagctaccggacacattgtttgtacttcatgtgaataaatcatgttaagactcctttcaaatatgtatgattttacttatgatgattgttataactttaacatcacatatatgttatattttctcataaacttccgatttcgtctatatctttttcactttttttcatatttcgacactcccatgtgggaaagatgaaaaaaactgtcgttccttgtcacttttcacaataatttttccactattttgtcgaaggctcctcttccaactgcttttccagaagtttgagcgcctcctccaccgatgcatttctgttttcctgccttgtcccatgaaatctgcactcttttgtgacagttcttccacatagataacagccgatatagacaagtcctaccggcttttctttcgttccgccaagtggtcctgcaatcccggtcacactgagcgccgcatccgctcctgctgcctttgcagcgccctctgccatctcctctgccgtctgtgtgctgaccgccccatattgttccaaagtttcatgccgcacatgcagcagtttttctttcgattcattggcataagtgatatatccctctttatagactgacgaagcccccgacacattcatgatgcgccctgccaaaagccctgccgtgcaggactctgcggtggtcagatacagacctctcttttccagtttttctacaattctttcttccagactcattttattttccttctttctgctctacaactaatcatcctcatcaaccttgcactgacaaagagctctctgaaaacaactatgcttttccgccctttcggaattttggcattcctcaatattagattttctttgcctgaatcgaaaagaaagattgtccgcccttttggcagcacaatctttccttcttcttacatgccgccctgtgtcagcacttctttattcttcctaatataatctaccagagatacgattgtcaggatcaatgacacccagatgagaatctgttccactactgcgaatacacttccttcaaacgccgcgatcaatacaatgatcatcgccatctggaacacggttttaaacttgccccagtaacttgccgcgattacaattccattgtccgaagcgatcaggcggaatccactgatgataaattcacggctgataatcacaatgacgatccacgccggaagtcttcccatctctacaagacagatcattgccgcaccgacaagcagtttgtctgccagcggatccataaattttccgaaatttgtcacaaggttgtatttccgcgcaatttttccatctaaaagatctgtcagacttgcaatacagaaaatcgcaagtgcgatccacttacttgccgccatctctccaccgagggacggaagcatgaaccatacaaaaaacgggatcatcaatacacggacaaccgttagcttatttggtaaattcattatactatctctcctatcaaatcatattccagtgccccagtcacttttactcttgcaaaatccccggacatcagttcttcatcggtatttacaaagatcaatccatcaacattcggtgcatctttgtaagttcttccaacatatgcattttcatcggcaatctttccttcgatcatcacgagcacttctcttccgatcatatcttctgcctgctcaaacgcgatatcctgctgaagctccatcagttccgcctgacggtcctctttgacgctctcctcaatctgatctggcatcgttgctgccggagtatcctcctccggagaataagtaaatacgccaagcctgtcaaactccatctgatctacaaaatccatcaattcttcatgctgctcttcggtctctcccggaaatccggtaatcaatgttgtacgcagtgtaatatccggaatctctcttcttaatttttcaatgatctcgatcaactgtgctttggaagtccggcgtcccattctctttaaaatgccatcgcttgcatgttggatcggcaggtctagataatggcagattttgctctcctctttcattacctggatcaattcgtctgtgatctcctccggataacaatataaaacacgaatccaacggattcccgcaattttacataattccttcaacagtttatgaagtgatttttctccgtaaagatcctttccgtaaagcgttgtctcctgcgccacaagaatcaattcctttaccccctgctccgcaagttcttccgcctcacgaaccagctgttccatcggaacactgcggaaatttccgcggatcttcgggataatacagtatgtacagtgtttgtcacacccttctgcaatcttcagataagcgaaatgtcctcctgttgtcacaagccttttactatctactgtcggaagtgcatctatatctgtcattttcagataatgatgtccttccagcgcttcatctacggcatctaaaatcttatcgtaagaagttgttccaaggactgcatccacttctggaatctcatcaataatctcctgctggtaacgctgagcaagacagccggtcacaatgagtgccttcagtctgccttcttttttcaattctgacatctccaaaatcgtctggatactctcttcctttgcatcgtgaataaagcagcaggtgttgatgacgataatgtctgcctcactctcatcttctaccatctgataacctctcgatgccagcatgcccagcatcacctctgtatctaccagattcttatcacatcccagtgatacaaataatatattcatctgctattttctcctacatatttattaaggcagatacctatgcatctgcctctgcggttctattcgttagaatcatcctctgcgatgatcttgattttccctttgttcaactcatcaattgcgatagaaagcggcttctctccgtcttttgcacggacaagtggcatctctcctccgatgatctgtcttgctctctttgctgttgcaagtacaatagaataacggctgttgacaatctttgtagccccttcttctacgtcctggtttacgactttcattaagtctgtataagatggatgtaacattctatgattctcctttcaaattttcatctaattcttctttgatctgagccatgaactgtcggttacgaaaacttcttctgtgctctccctgaatgatctgatgcatctcctcgatacaggtgtccagatcatcattgacgatcagatagtcgtatgcctccataccctcagcttcttctgcggctctctgcatgcgggattcgatcacttccattgtctccgttccgcgccctaccagccgctcctttaatacagcagcactcggcggagtcacgaacaataacagtgtctccgggaacttctctttcactttcaatgccccttggatttcaatttccagaatgacatccttccctttcgacaactgttcttccacatatgcgcgcggtgtgccataataattatttacatatctagcatactctataagttcatcttgtgcaatcattttttcaaattcttcaatttctttgaaaaaatacgcctttccttcctcttctccctcgcgcggttttctcgttgtggcagaaatcgaaagtgcataattatcatacttttccaaaagccccttcatcaatgttcctttgcccgctcccgaaaatccggaaactacaattaagattcccttctgttccatctgttcttcctcacaattctctgttcgctatttgatagctgtttcttctgttttttactctatgttctgaatctgttctcttactttctcaatctcggtcttcagatcgatcgcccgatttgaaatctccagattgttcgccttagacagaatagtatttgcctcccggttcatctcctgcgcgatgaaatccagctttcttccgattccttcggcttcttccagtgtctgcttcatatgttcaatatggcttctcaggcgcacaacttcctcatcggtacaaatcttatctgcaaagattacaacttctgctgcaattcttccttcgtcaatctgtgtatcggtaagcagttccttcatctttgcttccagcttcgcacggtaatctgcaacgatttgcggagaatgttcttcgatataagtcactttttcgagcattccatctaatttctgaatcaaatctttcttcagatgttccccttccatacttctcgtctccacaaactggcggcatgctccttccaatgctttgctcaacccattccagatctcttcttcatctacggtctgctcttccatcgtaaacacttccggatatcttgagagtgttgatacacgaatatcattttccagcgaaaacttctctgacatctcccggaaatatctcagatattctgctgccagagattcattatattttaatgagatctgcccttctgacatatcttcataagtaatgaaaatatctactttcccacgctgcacatatttctttaaaagcgtacggattgccgactcgaagaaattcaactttttcggcatacggatatttacatcaagataccggtggttcacccccttcatctcaacaataaatttacgttctgactctgcgatctcacaccgtccaaaacccgtcatactttttatcataatttctgccctctttactttttctttcggtcttttttgctagactttattataatggatttactctttatcgtcaatcgcaattctttacctcatccaaaagtcatggtatactattacagaaatgtccaggcagccatgctgcctgccggtgtccatggaatctttcgttttcatacacctgatcacatttaagaaaagaggaattacatatggcttttgatggaattacaatcgcaaatattgtacacgaattaaatagaaatctgctcgatggaagaatcaacaaaatcgctcagcctgagacagatgaattactgctgacaatcaagacacccggcggacagcgcaggctcagtatttctgccagcgcttcgctgccgctaatctatctgacagagggaaacaaaccaagtccaatgactgccccgaatttctgtatgctgcttcgcaaacatatcaacaacgggcgcattacgaaaatctggcaaccaaaactggaacggatcatccattttgaaatcgaacatctcgacgagcttggagatctctgtaaaaaagaattgatcgtggagatcatggggaaacacagcaatatcattttctgtaatgaggacggaacgatcattgacagtatcaaacatgtatcgtcccagatgagttctgtccgggaagttttaccgggacgcacatattttatcccggatacgatggaaaagtccgatcctctctcggtctcttttgcagaatttcaacgggtactgaccgaaaaaccgatgccgcttgccaaagcagtctatacaagttttaccggcatcagccctgtcgttgccgaagagatctgttatctctccggaattgactctgcactcactccaagagagctctccgaagatctcctgacacacctttaccgtcagtttacattgtactttgaggaagtgactgccggacatttttctccggcaatctattatcatggtgcagagccgaaggaattcagtgcacttccactgacacacttctcccagtacatcagaaaagaatatgactccatttcacgcctgctggaagactattatgcagaaaagaatacactgacccgcatccgccagaaatctgtcgaccttcgccgtgtcgtgcagactgccctggagcggaaccgcaaaaaatatgacttacaggcaaaacaactccgagacacagaaaaccgtgaaaaattcaaggtctacggggaactgatccacacctatggctacaatctggagcctggtgcgaaaaagctggaagcgctgaattattacacaaatgaaatgatcacaattccgttggacagcacaaagacgccacaggaaaatgcactgaaatattttgagaaatacaataagcaaaaacggaccttcgaggcactgacttctctgatcgaggagacaagagatgatatttcctatctagagtctgtcagcaatgcgctcgatatcgcactcagcgaagatgatctgacacagatcaaagaagaattgatcgaatccggctacatccgccggaaatttacgaaaaagaaagtaaagattacaagcaagccgttccattatctctccagtgatggctatcatatttatgtcggcaaaaacaatcttcaaaatgaagaacttactttccactttgcctctggaaatgactggtggttccatgccaaaggaatccctggctcgcacgtcattgtaaagacaaacggagaagaactgccggaccgtaccttcgaggaagccggaaaactcgccgcgtactattcgaagaaccgcggaagtgaaaagattgagatcgattacatcgaaaaaaaacatgtcaaaaaaccaaagggaggaaaacctggatttgtcgtatattataccaactactcactgatgatcgactcagatatttcacagatcaagcaactggaagactgattaaattacatatgttcaaaagcttaaaaaacaaaactgccgcatcggttttctctgatgcgacagttttttcatttccttcttgttctaattaatagtcccagatatcgatcataatactaataatcttcttggaatctttgtcaaattcaattcccaaagaacgtgtaaataattcatcgtcccagctgtaggtgagaattccagtcttagtgtcttctgatttttctctcggctctccgtatttttcaagtaattcagcctctgtcatgccaaggcggacatctcccggaagtgcaatatcaacaatgccctctccatcacggcttgtgatatagaaccctgtcaaagtgcaatctgacacttttgcatccttatctcctgtattttcacaatacacgcctacctgatttccatttttgtccttcaacattggaaattctgtttcccccggtttcaccatcttatctgccggtacctcttcggcatcaacctttaagcctgctgcctctaattctgaaaccttacacggaagtgtcactgtttttccgctcacattcagctctaaggattcccaggaaacggttcccttcttttctgtctcatccacatctgcagtgtcttccttctcaacctcttcctctgtatcctcttcgagatcttctcccatctctcctcccagcaatccatcgatgcttccatctgcatctatggcttcttcttttgcttcttttggaagtttgatttctttcactttattatactcatcaaaagtcatttccagattcagttcctggatctccatctctccgctttcttccattgctgtcatgagtacatctttcatatcaataaaaatgcttgcaggaagaatctctttcttatatacagtgatagtacacggaatctccagttctttcaattcttcctccgatactgctcctcccattccaaaagcatccagcatatcttctcccaacacatctgttgcaaattcaccaccgatatctcccttaagctcaaagcattcttttccatttacggtcacgagttcttctgataaggtaaatgcctttgcctgctttgtcaattcttccaccatacccgcattcaatgtggtttcttcctctccactttccacaggtgatttcgtccacatgttattcacataagtatagctcatcagcccatcatcttcttttacctgatagttcgacatatccatcgaaacctctgtgcccgcaatatccatcaagagctttccttccatctggaacccttctgacttttctaccgatgcgagatcaaaatccattttcatccccacactttgaccttctaccgcaaattccatattcgcagtcatctttcccgagatagactcaatcgtctcaccattcttggccatatctttaaaaagacgttccggggttgctttcttcttacatccagctccagatacacagagcattactgcaatcaatcctatcgtacctgcttttttccattttctcataggctttcctccgttgtgttgatttatcggtattatatcatttttactgtgcattttccatatttttacgctgcatttttatatttttttgtgcacttatatctttttgatatcttacaaagaaatcaacaccggaaatatcacctctgatcccttctccctttaatagtttccaagtatcttgagatttctcgcttcttcccggataccacggatggcattttttacagcggcatcgttaagatttccttcaaagtccacaaagaacctatattcccatgtccgtccttcaatcggtcttgattcaatctttgtcatattcagatcattgtaaataaaatgagagaggatgtgatacaaagacccgctctcatgtggtatctcaaagcagatactgatctttcccgcctgtttcaaatataccttctgattagagacaatgataaagcgagtagaattattactgttatcattgattccctctttcagaatctccagatgatggatctttgctgcatactcactgcataccgctgcctgtgtcttcttctgctcctttagcactttctgtgctgcgattgctgtatttgccacactgatctgctgccagttccgatgctcatctaaaaatctggcactttgcatcagcccctgcggatgagaatatacacactcaatttcttctatttttgttcccggaagccctgcaagcatatgtcggattggaagtacaatttcccctacaatgtgattctcaaattcaacaagtaaatcatatacctgactcacagcccctgcagatgaattttcaataggaagtactgcataatccgcgagtccatcctccaatgtttccatcgcgtcacggaacgtctgcacatgaaagctgtcacattcctccccgaaatagctgtggagcgccgcctgactgtatgccccttccacaccctggaatacaagtctggcacctttcttatcgagggaatcaatcccaataaatgccgtcttcccgatcactccatgctctgtcagaatctgatactggagttttctgctcattgccatcagctgttcatacagttcggtgattcctctctgattaaattcattggatgccatctgtgagagtgtcgccaacttctgcatctctctctccttgtcatatactttcttacctgatgcgatctttgtgagtcctacctctgcgcacaattccattcgcttctcatataatctcacaatctggctgtcaatttcatccaattgttctctgatttcacttaatggtatcatctgtctttcacctcattatcttttttaccaaactatgctgtcgcagaaagctctccggcttctttgtcctgcactttgtatttttcctattatattacaatttctggataaaatctagattttggaaaatactgttactatgaaaaataaatttatcttatgcggcacagcaggctggtgcatggaaatcctttttacaagcctgcattctctttttcacagagactacaaattatcagggaaaacttccgtctggatgttcccaatctacggaatggcaagcatactgacacctctctttgagatgttgcgaggaaaaagtgtgatgctccgcggcagtatttatgcatgcctgatttttctaggcgagttctgttccggctctcttttaaaaaaatacgatctctgtccgtgggattacagcaatgccagatggaatatctgcggtctgatccgcctcgactatgccccactatggtttggagccggacttttctttgaaagactcctttccaagtcagagtgatcacattggttcccataaagcctccctttttgtacttgaaaatcttgtcattttattatatgataaataaaataattcaatatgcaggaggctcttattatggacacaacgcaatgtattcagacacgacgaagcattcgaaagtacaaatccgatccaatcgatcacactttgttagaatctattatttcaactgcatcttattctccatcttggaagaacacacagatcactcgctatatcgcgattgaagactcttccattctcaaaaaaatcgctgatgattataccccttcctacaattctaatattgtcagtcagttatccatgttagttgcggtaacgatggtaaaggggcgctctgggtttgaacgcgacggttcttactccacgaaaaaaggagaccgctggcagatgtttgacgcaggaattgcctgtcagagtttctgtcttgcagcgcatgaagccggacttggaacagtcatcatgggaatttttgacgaagatggcatccgcaaccttctcaacatccctgaggagcaggagcttgcagctctgattgcagtcggatatccggacatttccccggaaccaccgaagagaaagactgtttctgaattattaacatacaaataggaggaagttatgagacacttaatgagtcctttggactttaccgtagaagaattagacaaattattagatcttgccaatgatattgaagcacatccagacaaatatgcacatgcatgtgacgggaagaagcttgccacactcttttatgagccaagcacccgcacaagactaagccacgaggcagctatgttaaatctcggtggaagcatcctcggattttcttccgctgactccagttctgctgccaagggagaaagtgtatccgacacgatccgcatggtatcctgctacgcggacatctgtgcaatgcgccatccaaaggaaggagctccgatggttgcatgccgccactcttccatcccggtcatcaacgcaggggacggcggacaccagcatccaacacagacattgacagaccttctgacaatccgctcgttaaagggacgccttggaaatcttacaatcggactttgcggtgatttaaaattcggaagaacagtccattctctgatccacgcccttgtgcgctacgaaaatgtacggttcgtcctgatttccccggaagagcttcgtcttccaagctatatccgcaaagatgtgttagataagaataacatcccttacaaagaagtcattaatctggaagaggcaatgccggaactggatctcctctacatgacacgtgttcagaaagaacgtttcttcaacgaggaagactatgtccgcatgaaagatttctatattttagatgctgccaaaatgtctctggcaaaagaagatatgcttgtacttcatccactgcctagagtcaatgagatttccgtggaagtggacaaagaccctcgcgccgcttatttcaaacaggtacagtacggtgtctatgtccgcatggcgctgatcctcacacttttagaaatcgaagtttagacggcagaaaggagtttatcatggaaaacaatacattaaatgtcagcagtatctcagaaggatttgtattagaccatattcaggcaggaaaaagcatggatatctatcactaccttcgcctggacaagttggattgctgtgtcgcaatcatcaaaaatgcaagaagcaacaaaatgggaaagaaagatattatgaagattgagtgtccgatcgacatcattgatcttgacattctcggattcatcgatcacaatatcacgatcaatatcatccagaatgacaaagttgttgagaaaaagcgtctggaactcccaaaagaaatcacaaatgtgatcaagtgtaaaaatcctcgctgtatcacttccattgagcaggaattggagcatgtatttgttctgactgatccggaaaaagaagtataccgatgcaaatactgcgaagaaaaatacgacagaaaaaatcactaattgaatatatttttattgcattggattgcaaaaggatttcctttgtaacaaaaaggcgctcctcttcgaacgacaggcaaaaaatctattgcctgtctgctcgaaaaggagcactttttttctattctattattcacaattgccattataatacaaattccaactggcaatcacacggttctttctccacgctcttctgattatactcgactgcctccacacatcccatttctttgtaaaatgcctgtgtctcctcacaggaatgtgcagaaatgtacaatttctttgcacccatctttcttgcagcttccacgcaccttgtaaaaagctgtcgtccaattcctctgtttctgcaatcataagaagtatgtatactggtcagttccaaatactgcttctcctgtccgaaaaactcgtgttctaccgatgcaaatcccttcaggcgttcctccacaaacgcaccgaagacaactcctcctgtctgtatcgtgtggatcagacactccgtcagataccgatagtcactatcactccactgttcgttaaatacgatgtccttcaatacccattcaccgtcttccttccgccaacagcgatttacttcctgatagcggtcaaagtcagcaaacagtgacacagacaactcagattctttgattcttctgtaattgattctaccttttcccatagtcggtccctcctgtaaaatcaaaaagcattaagcaagacgataagccgggttatgtcgttggacaatcatctatctaggcctgccgttgccggaaggctcaagcgacctacctaaaacgtgacgggccgccacattgttttcgttcggtcttgcttcggatggggtttacatatgccctcgctgttaccagagaggcggtagtctcttacactgcccttccaaccttaccggtcatatgaccggcggtatatttctgttgcactagccttggagtcacctccaccggacgttatccggcatcctgccctgtgaagcccggactttcctcacctgccacctttcggtgattgcagctgcgattgtctgtcttacttaaatgcctttgtattctatcatcttctagcaaaaaagtaaagacttctgttaaaaaatacatcttctacttccatttaccatacattatagcacattttttcaatttgcaaacacaatgacagatatttttaacttcttttccaagatgtataatcttctgtctttctgccatactagacagagaaacgtaatatgaaaaacttgaggagggcttaacaatggctgatatttctatcttagatttacaaaatctccgtcatttgatcggaggatatgacacaacacactgcaaaatgacagattatgcttctcagacaaccgatcccgaaatcaaaaaattgttccaggatgctgcagacagtgcaatgaaaaacaaacaggaactgatgagatttttataaggaggacatcaaaatgaacgaaaaaacaatggtcgcagatgcactggtaggtatcaacggagaattaaaaatgtttggagaaatgattccacagacagagaataaagaattaaaacaatgtctgaaacagatccgaaattcttgtgaaatgtcacaggagaaactgtatgaagtcgcacgccagaaaagttactatgttcctgccgcaaaggcaacggagcaggaagtaaaccatgtcaaatccattctgactcaaccgacaatgcactaattttttcagccgcctcccctgctgcatcactgtaccgaagccggagaggcggctttctgtgtctgaaaacctctccgatactgacatacatacggttcttttctaaaatctccaacttttcttataatcctaagaattctttactttcttaatgacaaaaaatattttatcctgtacaatgatatctaactgacaaaagaacaaaagaattaaggagctattttatgagtattttaaatgtagaacatttatctcacggcttcggggaccgtgcgatttttgaagatgtttctttccgactgttaaaaggtgagcatatcggacttgtcggtgcaaacggagaaggaaaatccacttttatgaatattgtaaccggaaaattacagccagatgagggaaagattgagtgggcgaaaaatgtacgtactggatatctggatcaacatacggttctggaaaagggccagacgatccgtgatgtcttaaagtcggcattccagtatctctttgcactggaggagaaaatgaatcaaatctgcgactctctcggcgatgcagatccagaagaaatggaagcgctgatggaggagctgggaacaatccaggataccctgacacttcaggacttttatatcattgactctaaagtagaagaagttgcacgcgcactcggattacttgatatcggtctggagcgagatgtcacagatttaagcggaggacagcgcacaaaagtactccttgccaagctgcttttagagaaacctgatatcctgcttctcgacgagccaacaaactatctggacgaagaacacattgtgtggcttaagcgctacttacttgactatgaaaatgcctttatcttaatttcccatgatattccatttttaaacgaagtagtcaacatcatttaccatatggaaaatcaggaattaaatcgttacgtcggtgactatgatcattttcaggaagtctacgcagtcaaaaaatctcagctggaagctgcctaccgccgtcagcagcaagaaatcagtgaactaaaagactttgttgcccgcaacaaagcaagagtttccacaagaaacatggcgatgtcccgccagaaaaaactggataagatggatatcattgagcttgctgccgaaaaaccgaaaccggaatttcgcttcaaagtcggacgcactcctggaaaatacattttcgaaacgaaagatctcgtgatcggatatgacgaacctctttccaaaccactctccctttctatggagcgcggtcacaaaattgcgctcgtcggcgccaatggaattggaaagaccactctgttaaaaagcattcttggcctgatccatcctctgaaaggttctgtggaacttggggaaaatcttatgatcggttattttgagcaggaatctgcaccagacaataaaacgacctgtattgaagaaatctggagtgaatttccatctttcacccagtatgaggtccgttctgcactagccaaatgtggtttgacgacaaaacacattgaaagtcaggttcgtgtgttaagcggtggagaacaggcaaaagtacgtctgtgcaaactgatcaaccgagagacaaatattttacttttggacgagccgaccaatcaccttgacgtggatgccaaggcagagttgaaacgagctcttcaagaatacaacggcagcattcttctgatctgccatgagcctgacttctatcaggatgtggtaaatgaagtttgggactgcacaaaatggacaacgaagattatttaatttcatttcaaaaatatttctgatgcaacaaaaaacttcagcaagaactcttttgctctgtctttcttctaagattcgacagattcaaactggttctttgctgaagcttttgtttgttttttatcgtatttacttttccacttgctcagatgcacaatctttcggagattcttccttctcctctgcttccttctcctctatcggcaggtttcctaaaagaggctgtgacactggcacctcatttttcataaaatcctgctctccgctcatcggattccccgaaaaagacatttcccctttttctgtttcattcatggctgctccaaaagtacctgccataaattctctcgccgcagaattctgtgcctcttcctggtttcttgtcatcttctcctgtcggaactgatcttcttcctttcttgtacaacggaaaaagtaaattccgactgcaatgattgctgctcctgccactccctttgtcaatacatttccaatattccaaagaacatcatacataaatcccggcaaaatcacataaatcagcgaggaaattccatcccacagcaaggttgcaccgatcagaatgatcagaattgtaatgatagaacggtaagactggaaaaatccttttttatcgcttcgaaactctttcgccagttcatccatgtgaagtaaatatctgtcttctaccatgtaaaattcttccgggttcattgtctttaaattatgcacatggaaaaaactgtaaaaccatataaccgggagtaaaaaaatcggccatcccatgccaagcattgcaatcagtgccacgcttccccaaaatagaatcattagactgactccctgcttctcaaatcccatataaagctctcccgctcccgggatcaaagaagctatccatgttaaaaacccttttctttgtcttctcatacaaatcattccttccatttatcttattgattactttcttttgaattaactttattatacaaaaagaactttaagataggcgatatgatttattaagattttatgaaatttatcttcttggcacggctatactcttgtgtttgctttacagctattttcgatttcttttatactcctttgtcatacgaatgacctctccatgcagaaggatcaacgctgtcaagttcggaattgccatcaacccgttaaaagtatcagacagttcccaaacaagcttcggtgcaagaacagatcccggcagaagaagcaatatgtagatcagtttatatggaaaaactgcatgttctccaaaaagatatgctgctgtccgctctccaaaatatgcccagccgatgatggtcgcaaacgcaaacagcgcaatggagatagcaagaaatttgtccccatttggaaatactgttgcaaaggcatttcccgtcaacgtcgtgccgtcaatgttttcgactccatctgcaatgtttgaaatgcatctctgtggatcatatacgcctgaagtcagtattacaagtgctgtgattgtacagacaacaatcgtatctatgaacacttctgccattccccacataccctgaatctgcggacagcttacgtcagaagccgcatgtgccatcaccgaagatccaagtccggcctcattggaaaaaacaccgcgggaaatacccattttcatcgccatcttcacaccatatccagcaactccgcctccaactgcacgcagcccaaatgcttctccgaaaatccataaaaatgtttccggaattctctcataatgtatcacaatgacaagaagacctcccagaatatagaatgccgccataaacggaacgattttttctgctaccatcgcgactctctgaacaccaccgagaatcacaccagccacaagtaccattaatgccattcctgtaaattgctccggaattttcaatgtagctttcagcccttttgcaatcgcattagcctgtgtcatatttcccattccaaaagaggcgcaaagacaaaatatagaaaagaaaaccgcaagccacttcgcccccagtccccgctccatatagaccatcgcacccccaacccatgcaccttcggagtttttgtaacgatatttgatcccgagcacattttctgcatagattgtcatcatcccgaggaacgcagacacccacatccagaagactgctcccgggcctccggtcacaattgctgtggcaactccggtaatattccccgtgccaagcgttgccgctaacgccgtacaaaacgattgaaattgtgaaatagactgataatcctgcgcctttctgactctccggtcacgaaacaatgcaccaagtgtatcccccatccagactttccaacccttaaactgaaagaaaccggttcgcagtgtaaaaagcattccggcgccaaggaaaataaccagcatcccccgcccccatacgaacgcatttaccacactgttgatttgtcctattttctctagcataactcctcccatatttcaaatttcgatgcaaagcgaacctttcgctctatccgtactatcaaatatatgagaaatttttctgtttattagttttcccgcaaaatcatttgcccttttttcgatctcatagtacaataccactatgcaaaggagcgtgacacaaatgacagaacacgatattcaacttttaaaatcacattttactttctgggacaaactatcccctcatcaaaaagatattctaattggaggaacgactgctgtctcctatgaaagaggagattctatccacagtgctgacttagactgtgtcggtgtccttctcattaaaaaaggctctgtccgggtatatatcctctcagaagatgggcgggaaattactctttatcggctgtatgacggagacatctgtattctatcagcttcctgcgttcttcagtcaatcacattcgatgtccatatcgatgccgtttccgactgtgaatttcttcagacgaattcctgtgccttttcacagatcatgcaggaaaatatttatgtggaagccttcgcctacaagctggcatctgaaagtttctccgacgtcatgtgggcaatgcagcaggtgcttttcatgagttttgataaacgacttgccctctttcttttggaagaatccgccaacgaacaatccgacacgatccacatgactcacgagcagattgcacgcttcgtcggcagcgccagagaagttgtcacccggatgctcaaatatttttcctctgaaggatatgtcgaactttctcgcggaaatgtacacatcaccaaccgcgccggtctgacttcccttaccctgtaaacaccatttttctagatcaagtgtttcatacgcttgtaaaactattcccaaaatacaaaaaggaaatgtcctgctttttacagctatttagacatttccttgctttatcatattttttgcatcgtttctgctttcgttctcctagcacttatccatggatcatttccagtaactcttcttttgtctttgccccgagctcttgttttgcaatcttaccatctttgaataagatcaatgtcggaatggacattacgcggtattcctttgcaattttcatctgctcatctacattgactttacagatttttacatctgtcacttcttctgccagttcctcaatgatcggcagtaccatctggcaaggtccacaccatggtgcccaaaaatctactaaaactggttcctttgcctctaatacttctttttgaaatgtttcgcttgttaattgaattgctgccatttttcttccatcctttctattcctgcaatgatttatggtctgcctgacattcatcaggtctttttctatttcctttgttatctcttattatactcatgattgacagaaactctgtgagttagtcacagtttctgcaatttttcttaccagcttttatcagcaaaaaatcaggtttatgaaaaagatctgcataatccggatatttctccagaatttcaatcgtcagcagcggctctgtcacactttctatgcaaaatccttcttgaatcagtgtgttgagcattgttgaaaatgttctgtgatatttcttgacgccgtcgacaaaccatgtcgtttctctttctccctctactccataatccataagatttaaatatagctttttcccgttttcatctttggtccatctgtcacccgacgaaaaacaagtagtcaacggatgctcctgcgaaaacacaaatatgcctccatccttcaacagttgatacacatccctgacaactgcctcataattttcaacatagtgcatcgcaagagagctgattacgatatcaaactttttatgcaattttgatatttcttcgataggcatatggatataggcaatagaaggatgtccattctctgcttctgcaacctccaacatctttttggaaatatcaattcctacaaccgttgctgcacctaattccacaaattttgtacagtgctccccaaaaccgcaacccatatccaatattgtttttccatttaaatcaggtaataatgcaaacaattcgggaatctcaaacaaggtattggcatttatttcgttctgtcttatctttttgtaaccttcaaaaaaacattcgtcatcataaatattttgccttgccatctcttttccccttgctaaacttttctttttgccatctttagcatatcatattttttaatacttgacatcctcttcttgcgctgtttcgtttttccacttcttataattatacgcagcctgaataaaaaccggcagaaaaagaatcacgccaataatccttgcataggaatatgccggaaacgctttataaaatgcgatgtttatcattatcaatacaggtatcatccataatgttctgattaattttcgtctataactcaatttccaataacaaaattcaacccctttgtctactttttcactcatatcatatcttcttgcaagaaaaaaagaaaggaccaatccaatgatcatactaattatcattatcaagaacatattaccatcctccgatttctacttctattacgataattttaccattttagatcactgttacaagttaaatgtaagtaaagattttagaaaattattcttctactgtaaaaatttcttcaatcgtaacatggaatgtctttgcgatattccatgccaaaaccaatgatggattgtattttcccttttcaaggtttcctatagtttctcggcgtacacctacttttgcagccaattcttcctgtttcatatcaaatcttgctctatactctttaattctgtttttaatcatcggatacaccacacctatctttccaatcaaaataagcagtaacaaagcagaagacaattatggaaaacccaaatcccaaaccaatcccttttacaagcgcgacattagaattatgctctatgattgcataatagaacgtgacaatggctgttattactaattcagagaaaaacgcccacgcagcagcttttctcatattttgaacaaacatttcatctgtttccacaaagaaatattcaaaaaataaggcaaaacctaaaaacgggaaaaacataggattatctgtccaaaatcccagcaagccaatgagagagaaaaaacctaaaaagccatacctacacttcataatagacctccttctatgtggtatatttaacactttatgttataaatataccgctttttatgtttgaagtcaagaatgcacactacatctctctcaaccttttagaaactatgaaactacagagaaatgctcctgctacaataataaagcaaacgattgtacaccatacaggcactctcatatctaattgtactcgtagcaaaatcgtgattgctaaaaatacagctcccacaatttgtataaagtctaatatccttttttgaagtacctgcaaatgctttttatcttttattctttcagatttccatattccataatttacttgaagatcctttacatcttcatcagatataagttcgtccacacttacgtctagttctaatgccagtttttttgctgtaatcaaatccggacatcttgaacctttttcccagcgacaaactgtctgccttgaaacatataacttatctgcaagttgttgctgagtaagatttttttcttctctgaattttttgatgttatcatttaacgccatactccatacctctctttcattctcatcatataacgataaaatccaaaataaaagtgccagtatgtatttcccttgtttccattttggtaacatccatttcacaaacctgttacgctattttgcagtattctacagcagtgctatacaagctcactagactagctcgtttgcttgacaggcatatgccctatagataccaaaaaagatggccttattcctataaacaggataagtccatcttttccgttatctgcactgcctacttctgcacaatatttatatctactcggaattgttgattttacgctgttttccgctatctatcttctgatttactccatttttactccaattttaagccaatattttcagttcggctacttcttcttttttcttttcttctgaaacgtgcgtgtataaatcggttgtcattgccaatgttgagtgacctaagagtttctgcactacctgttggtctactccattttcataacatcttgtagcgtatgtatgtcgtagagtgtgacaggtaaacagttcaaatatcttcggctctctcttttcttcttttgccagttcaatctctattacattgatttttgccacatagtctttgattgcactattgacgttgtaataataaacgggcgaaccgtccgaacaggtaaataccaagttttgaaattctttatgctgtttccatatcgagcgtttccacatcttctgctctgtctgctttatcttctgattttgtaaaatctcatacacttcatctgtcataggaataacacgattactggatatggtttttgcagttgtgtagaaaaactttgaaccctcgacgggactggaagcctttgaataatgaattgtcttattgattgtaatttctcttttttcaaagtcacaatcttcccatttcagcccaagcacttctccaatccgacaacctgttgtcacagcaaatttcagaacattgatatgtatataagaagaagcaaatgtaaagaatttcttctgttcctctcttgttaatacacgtctttcttttttcacttttgggggcatttccacagcaatacagggattttttctaatatattcactcaatactgctttatcaaacatatcactcagcataaatctgatgttcgacaccgttccatgtgcaagaccgctatctatcaattcatttatgaatttttgaacatgatatgttttaatgtcctgcaaatacatctttccgatagagttcttcactcttgcgttatagtaactgtgatttttatatatcgtagtcattttaactgttttcttcttatacaactccgtccacgttacataccatgcgtttaaagtgatactttcgccgttgccattcaaaccatgttcatcttcataaaccgcttctcgcaacttccgttttaattcattcagtttaaaatcataaagcgtttttcgtttccctgttttgcttgtaaatcttgcaatatagcgtccgtctgctctctgtgaaattcccttaccgagttctttgccctttaaatctttacccataccaactttcctttcttctactgaaagaaatatggtaaagtaaatatttcaattttcattatatccacaccccattttcttttcaagcccttttgcattgatattccagccattcatcaagtaatttcttatttgcatacaaccgattaccaatgcgtactgtaaatctatttttcggattgttcaacagttctcttgcctttgttttcccaatccccatatactcacaaaattcatttatatttagtaatgctttttcgatacgatcaccccctttcgtctaattttcttgcttttatataatcatcatacaactgcttctgtgtaatattcatttctccattttttacaagattgccgatataatctcttttctctatcttcccaacctctgcaaacagtttcaaagacggtgcaacatacttttccaaccactcccacaccttttgtaaacttttcttctgtggttgcatggtaagtttcaccttgcctatatctttcatcagttccgcccatgcttgataggttggataaagtctttttcgtgttgtcatgctgcctgtcggcttttctaaaaatcgtattttactgttcaatacttccattgccagtcctgccacatctctatatctcaataattcctgtactacacttaccgccatttcctgccgaaatctcaactcatatctattccaattttcgtctaattctgttccatactttttattctgttcatatcccttttcataaaataccaatctcaaattactggctgaactgccgagataaagactgccacctttactctgaaacacttcttctttcagttctcccgagtcgtgaaaatctatctcccttagttttgtggaaagcaatccctcttttgtccgtacaatcaaatcgggaatactcaaatacggttttctgtcgtctatcgccaaatcaatccgaggaacattgatatgatactggcaaactctgttcaagaaatcaaaccatgtttcctcattgagttgtaaaaaattctcatagttgcgacagcctttcccactcatcaaaatctgaaagccttgatactgtgcatttcctgtcggctttagcaccttgatattatcgaagattgccacaacctcatgtcctgcaatccccttttcatagcccgttacagtcataagttccataggtattttcaacacatcttctatgactgcttctaacggaacttccttaatggttatctgacaccaatctatcaaggcacttaattcttctttctgccgtattactcccctgttagtgtaggggagttctggaagaaaacttccgcttctttcttccaaatttatcaaacctccttacctgcaatggcgttgccattgccctgccccccaacctgccgtttggtacgtcagaacgagggcaggaactttgaccgcctacatatttttatttggaacagggcggatacccttacaggtaatcttctccactaatacaggaaagtttcctctctgcacataaggagcatatactggttcttccagttccaccacagcataaggctcaatcttcggaagttccgttgcttccaagcgaatatccacgctgttcctaagtttcatgcttccaagatgaagttttaaggcttccacttcctctgttttcttcttactgtctttatcatagcggtaacagttatccgcacccataaaacgaagttctccaaacgcttcttttacctgttcttttgtcaatgtaatctgcatacacgttcctttctccccgttgaaccgataggtcagcttctcatattttcattttcatatttacgacgtcgtttttagttcagttatttctgaacttaattgtatattagcacagacatattcgttttgcaatataaagtttagttttttataaactttttgttttcttttttctgaacttgtggtatagtgtccttagacgataagatatgaaaagttataacaggatatggaaagagagggttttcagatgaatacaatcgcagaacggattaaatttgccatgaaagcaaaaaataaaaaacaggtagatatagtcaaagatacaggtatcagcaaaggggcgttcagttcctatctttcgggacagtacaatccgaaagccgataaaatggaactgattgctgactccttagatgtagacttgcggtggctttacggacaaaatgtgcctatggaacatacaagccaaaatgacaatgccctgcaatatgtcttttataacaactcctgctccgaatatcttctcgataatttagacgatatctatattgccatgatgacgcaatatgccgcccttattccacgcttttatgtccttgtcaatcgtgctggaaatgcaatgcacatactgccattatttttgaaagaggatagttcccaattctatgaatgtccgtctgatttcttctattctgacaggcataccatttttacaagagattttgaaagtattcacatggtattaacaacagccacgatttactattatggaattgatacaaagacctgtgaaccaaaagttaccaaacttgcctactcacaaactgacgattgcttttatatcgacaacggaatacaggacggtcacataaaagcatttgaaaaagaagtggtaaaagaagcactttatttaaagaataacgcccaataacagacaagaggacttgcaaggtttctgacctttcaagtcctctgctgtatcatggtgcagttggctgcgtccgttccgtcaaggactgccctacggcgtatcggctacgccttgttccttgacctcactaggttttctctttttcttgacacaacaaaagcctgcacgatttttcttcaatccgacagactctcattctttcacatactctatcaattcttctattccacaatccaagtaactgcacagtttacagattagttgtgcgtctaatctctgaaattcatttctgcaataacgattaaaattagacctcggtatatccaattctttacaaatggtattcttactaattcctttttctttcagcagttcctctatgtgaagttctaaatgtccgtacttcattacctcacctctacataaaagtatattcaataaatctttatgtagtaattcactatacagtgaggtactatatagttatccttataaatatatagaaacagaggtatgtcaaaatgaaaaagaaattattatttatcactattattctagtcttgcttgcaagtgttctctattatatcagtttacccgattatcttgtatttaacagtatgtcattcagcaatggggctaatcgtgataccgaactacaagttatcgtatatcaatactggaatactgatgaagtggtagcagaaattgaagcagaacataaccaaatcaacggaactcccaccacccttacaatcaatctacaccgttctaaatggtcttttcacaatggatatgaaccattttataccactactatcaattatgattgaaaaggaaaagcagacagtcgattaaaaaactgtctgctacaaactggaagttgtaattacattccatacatattggcattctttacaattactttatcgcctttttctaattgttccttggaaattcctcgtaacccaagtccaacatgctctgttttatatccacaaccatttgcttttcgttcttttgtatgtacatcgacagtagtaattctagtttctaagacatctccatttgctttataaatacacgcattttctccttctctgcacatccctattaatatgtttcctgtggcaactgttccaacccccataattgtaaatacatcatcaataatcaattcaaaatcttcttttaaacacgatggaacatctaatctgttcatatattctttttctcgttcttttttgcttttaccaaataaccccatagtatttctcctttgcaacttctaatttgtttatttctcataatatcatactttgcaattatttacaccattataatcaaaaaaaataacgcagacaatatctctaccatctgcgtcattcctttcatgtcttcttgaaatatttactccattttctttcaacttttactccaaatttactccattttaaaaatctgttacgatattttgcgatattctacgataccttttcattgaagaaaaatgtctgtaaaccttgattttcagcgaacttttcaatatttccaagcactttattctgttgtgagaatttcttctcaattatttctgcacaatattaataattcttcccggaacgtaaatctcttttacgatcattcctgtcagtttatctgccactgcttcttttccttttgcaattgcatcttctttagatacatctgccgcaagtgtcacgacagctcttgtctttccgttgatctgtacagcgatttcgacctcgtcgtctttcatcgcctcttcatcataagtcggccatcccgcattgaatacggttccttcgtgtccgagctgctgccataactcttctgccatatgcggagcaaacggagcaagcagtactgccagtgtgcttaatgtttctttatccacgccgcctgctttttttgcaatctcattcagcttattgttgtactccataaatcctgaaataactgtgtttaagctaaagctttccaaacgtgttgtaatatcatataccattttattacggatcttgatcatctcttttgttgcgctgacatttttgtctttgctgtccataacgagattccatactttatttaagaaacggtaaacaccatcgattcctctgtcatcccactctgcatctaattccggtggacctacgaataattcatacattctcagagagtcacagccgtaatctcttacaagatcatccggagatacgacgtttccttttgatttactcatcttgattccgtttttaccagtgatcattccctgattgaataatttcttgaatggctcatcaaaatcaattgccccaatatcacagaggaattttgtgtagaaacgagagtacaataaatgaagtaccgcgtgttctactcctccaatatacatatctaccggaagcatctcatctgctttttctcttgatacaagtgcttcggaattatggctgtccacatagcggaggaaataccaggaagatccagcccactgtggcattgtgtttgtctcacgttttgcaggttttccacaaactggacaagttgtatttacccagctttcaattcctgcaagcggagattctcctgttccggtcggctcataagaatctacttccggaagtgtcagaggaagctgctcttccggtactggaactgctccacaatccgggcagtgtacaatcggaattggttctccccagtaacgctggcgcgagaatacccagtcacgcagtttatagttgacagttgcctttccaaatccacgttcttcgatgatatgcggcgcttcttttttcaaaacagctgattccattccgttccactcaccagaattgatcatcgttcctgctgcctctgtataggcctctgtcatattttcaatttcttttccatcttttgcgattacctgtacgattggaagatcgaatttctttgcaaatgcaaagtcacgatcatcgtgagccggcacacacatgattgctccggtaccatagtctgcgagaacataatcagagagccagattggtgtctttgctccatttaatgggttgatcgcataagatcctgtaaacactcctgtcttttccttatcctgaagtctgtctacattcgacttcatagaagcatcatagatatactgttctaccgcttctcttgtctcatctgtggcaagactcttagcaagcgcatgctccggtgcaagtaccataaatgtcgccccgtgaagagtatccggtcttgtcgtatagacagtgatcttatcttctcttccttctacctggaaatcaacttctgcaccgtaagattttccgatccagtctgcctgcatcttctttaccttctccggccaatctaatttatcgagatctgcaagaagcctctctgcgtattttgtgatccgaagcatccactgacgaagatttttctttgtcacttctgttccgcagcgctcacatttaccatttactacttcttcattcgcaagacctgtcttgcaggaagggcaccagttgatcgggaattccttctcgtatgccagtccttctttgaacatttttacaaagatccattgtgtccatttataaaattctggatcagttgtattgacttccatatcccagtcatagagagctgcgatctcattgatctgtctcttaatattttttacattctcagcagtagaaatcgatggatgcacacccatcttgattgcatagttttctgccggaagtccaaatgcatcccatcccattggatgtacaatatagtatttctgtaataacttatatctgctccatacatcagagattacgtatcctctccagtgtccgacatggagaccatttcctgatggatatgggaacatatcgagacaataatatttctctctctttccattttcatcttcttttacgttcactggatgcttttcccagttttcacgccattttttttcaatcgccttatgattataaggtactgccattcttttttcctcctttttctccaagaattccctctgcggaaatcaatttcctatgcaataaaaaaaacctctcatctcatcaagagacgaaaaggctgacttccgtggtaccactcttattcatacagcatctcactgtacgcactcattgcttctgtaacgggaagtcccgcctctatctacttccatacagtgtattctgtatctctcgttcaatagaagggctccaaggtgagttcggagattacgctgctgcctcacacctgccggcagctctctgaaaacgataggctcttactactcctcttctttgccattgtctgattcaatctgtcatcacaatttcaatgatatttctattttatcatacgaagactatttgtcaaggcattgggaaaagctgtatttttttgtaaatttcgcataaatttttatattttattgccattttcttataattagtgtataatacattacataatcgacagaacgaaaaaacattataaaggagatagtgccatggtaaatttattaacaggccctaaagggagcggcaaaacacaacagatgatcgaattagcaaatgagacagtaaagcagtgtgacggcaatgtaacgtttatcaagaacagtcacaacgatacatacagtttatcttttgatatcagagtaatctgtatggatgactatccttccatcaagaacattgacgactacactggatttatttatggaatgcttagtgctaaccatgatattcaggctatttttatcgatggtattttaaaacatgccaatatttcttctgagaatatgcctcgcttcattgaacggttgaaaaatatctctaagagacatgatgtgaatttctatttaagtatcagcgcagagaaagaccagttaaacggaattgacttgactgactgtgcacttcttaattaaaacaacgaagcaattcaaatggaaaagttaatagttcacaatttccattacgtttaaaagccttgcagtaattgctaccgcaaggcttttctcttatcttttttctattttcgtatactctattttctttcaaatgcaagctcgatcagctctgtcacaagctctgtcgtatcgattcctttttctctccaaagcattgggtacatgctgatattcgtaaatccaggcaatgtattgatctcattgaaaatcacttcatttgtaccatgttccaggaagaaatccactctggaaagtccaaagccatctaccgctttgaaaattgcaacagcatcttctctcaccttttccaatgctccttctggcagttccggatgagtatctgtcttagaatccggattattgtactttgcttcataagtgtagaacgtatctgctgccttaatttcaccgacgtcagatgctttcacattctttccaccaagcacggcacattcaatctcacgccctttaatcgtctcttctacaagaatctttgtatcatgctttgccgcttcaagcaatgctgcctgtaattcttctctgtcttttgcctgattgactccctgagaagaccctgctttggacggctttacaaataccggatacggaagcatttcctccaccttgtcaagcgccttgtcgatctcctcaagctcatatgcatggattccaacaaattttgcctgacggattccaagatgatctacaatgatcttcgtgtaaagtttatccatggataccgctgatgcaagtaccccacatccgacataagggattttcgcaagttcaaacaatccctggatggttccatcttcaccgtacattccgtgaagaactggaaagatcacatctacctggatcttctccacagtatcccccaacacgagaattccatgttctccggcatccggtgaaagaattgcccgcttcccgttttcacgccaggtatcatttctaattgcttctgtatcttccactttcagccagcatccctcttttgtgatcccgattaaaaccggctcatattttgtccggtcaatatgcgagatcactgtaactgctgacttacaggaaacttcatgctcagaggattgccctccaaagattaccgctactctctgtttcttctctcccatttttccacatccttacttttcttttttcacttctttctattctatcggcattttctataaaatgcatttccaaaaatgctgatttcattgcaaatcctgctctatttaatacttaaaactgtatttaccttctcatcctgcttatattcaatcgtcactttctgtcccggctcatagcggatgacatcaataaagtctactaccgacacatcaaaaatctcctctgattcttccagaagaatatagtaatgtgagtttccttccacgactccctgtgcaatcttcgcaatggttccttccatcgtctgtacttctcgcttgtcttcctcttccttgatcacaccatccgtcagaagaagttcattgtatttttcctcacactggcttaccgtatctccgattgctacaagctgatatttctgtacatttaccatcgcatacttcttaacaaggcccgcatcatcttttaatgcgataaaataagtcggctctccggagagatttaaaagaagcgggaaagtcgccttgtatttcaagttctgtacctgaccttctgcagatgacattgcagaagcctctgtagcaccttcgatcggataaaattttgtttccattgttctctggttcatcagaacaaatccgacgttggactggtcaccactcacggatgtcacacccgtatatacccatacatcgtcatcgatcgcaagatagttatatccttctgtcgtcttcaggcagtctttctgtccaagcacactgttcaaaaatccatgcttcagcgctccatagtaatcataaagctgtacaagaagatcagaagaatatgcacggtcaatccacttcggcacatcatcgatcgcatagtctttcgtctctcctgtcactgcattacacagtacaactcttccaacagtctctcctccaaacagaccaatgttaaacttcttcaccgggcatacccagtatggaactccgtcatcatctgtctcaaaacttaactggtcaaaaatataagtcggataattgaagcgcaaatgtctgtaaatgttccggttaaaatattcgcttgtagaatacttgatacctttttctaattttacaagctctgtagactgtgtggccatatcaatacggacatacgccgggattccttcagactgattcgtgatccatttaataccactggcatatttgagcggagaaacacgtaccggtcttccttgatagttgatctggctgtaaatatcatccacctcaaattgagataccatatctaccatacttcccatctttcgatttccgagaagtgttgcagactctttgtcaagcagcgggatttgatcaaaggaaagttcttcgatatcctttgtaaattctccctcctctactttaagaagcttctgatacttcttcgcatttacgatcggagaagaaagtaacgctcccacaagatacacaacaacaactgctgccagtacaaatagaatcgccttcatccctttactcgtcttaatctcatctggacgaagccgtttcttccacgcgtagatcagcgcaagaactgcaactaaaatcccaataaagaaccaaaaatcacgagagtggatattgattgccggcagtgtaaaatagtaatacaaaaatgcaacaatcgcaagcacaatcgctccaattatttttgcctttgcttttttcataacatcctccattttctatatatcaataagttataatgaacagtataatacaaaaatatcatcagcgcaaacaatgtctgatgatattttataaacttcttataaacaatagaatctagaaatgttttctccagaaacttggagaacaaatcataagaaacgggaagatttcaagccttccgatcagcatatccatagaaaatacaattttagataacaccgagaaagactggaagttttctatcggacctactcttgaaattcccggacctacattgctcaatgtagtcagcactcccgatatggttgttgcaaaatcaaaattatcaagtgccacaagaagcacagaaattccaaatacaaatacatatgcactaaaatatgcatacaccccttgcaacgtctcattgctgattttctttccatttacttttacaacattaaccaatttcggatgcagcattcctttcacctgcttcaaaatacttttccacaagatcaaaaatctggacactttcactccacctccggtagagccggcacatgcaccaatcaccataatgagaagcaaaatacattttgacaattccggccacaaattaaagtctgccgtggcaaatcctgtcgttgtaataattgatgcaacctgaaaaatcgaatatcggaaagcttttaacggttctttgtaaatagagagaacattgcaggtgatcaccaaagttgccgccactataattcccagatatgctctgacttcctcatttttccagacagattttacatcttttatcaaaagaagaaaatacatattaaagttgattccaaacaggatcataaaaacggtgatcaccccgtcaatataagcactgtcatagtaggcaacgctgctgttatgatttgcaaatcctccggttcctgcggtactaaaggagtgaatgatactatcatataagttcattcctcccgccagaaggaaaatgatctccgcgacagtgagtgccagatacattgcatataaaagctttgcggtctctcgcgctttcggaacaagtttatccgcttctggtcctggaacttctgcccgcattaaatgcatagaacttttatcatccagagaagtcactaccataacaaacacaagtacacccattccaccaatccagtgcgtcagacatctccaaaaattcattccataagagagcgcctctatatctgtaagaatggtagatcctgtcgtcgtaaatccagatacggtctcaaacagagcgtccacatacgatggaatctctcttgataaataaaatggaagtgctccgaatacagaccacaatatccatgctgcggctacgatcacaagcccgtccttcccatagattcttccattttctggtttttttctaccaaagagaaggaaaaagatacacagcacaacgcttgtaatcccaaatgctgccatgtctgaagcttccccataaatcaaggatactgctgccgggatacaaagtacaagtgcttccacccccaacatttttcctaatacataagctgtcattttgtaattcatttttcttccaccactacactaaaatatcatgaaaatcctgtactttgcatttcaatgtaattacgatcacactatccccgatctggaggcaatcctctcctccgggaataataatttttcgattccttacaatacatgcaatcagcacatctttcttagtttccaggctcttcagtggtactcccacatagaaggtctgtttttttataataaattccagtgcctcaacacgatcatctacaagatggtacattgcctcaatattggcactgcggattgaattctggcgtgcacgcacatagcttaaaattgcatcggcagtcgcagattttgtcgatacaatgctgttgatcccaaatcctgccaccatctctgcccgggaatcttcattgactttcgccacaatctttggaactccctgctgttttgcaaaaagtgccatgatgatattctcttcatccattcccgtaagtgcaataaaggcatctgcatcaccgattccctcttcgatcagaagttcattatccgatccatccccatgaataatagtagcttccggaagcgcctcacacagtccttcactctttgccaggtctttctctatgatctttacctgcattccaagcttcgtcaactgcttcgcgagatagaatccaactcttcctcctccgcagatcaatacctttttgattttatttttacgatttccaatttttttaaagaaaatttccatctctcgatgagatgccgctatgtgaagcctgtctcctggctgcaggacaaattccccatccggaatataaacctgtgttccccgctgtactgcacagatcaaaactttaatcttatactttttataaaattctgcaagggatattccagtaatcgagctttcctgctgaagcggaaattctaccagttccactcttccttttgcaaacgtttccaccttacttgcaaccgggaagatcagcactctggaaatctcatttgcaactgtcaattcagggtttactgccatacttaaatgcagatcttccttcaaaatatcaagctgctgcagataaaccggatttcttacacgggcaatcgtatgtctggcccccagccttctggcaatcagacaacttaacatattcagttcatccgtagacgcacaggcaatcaccagatctgcgtggggtacatccgcctgcttctgcacttctgcactgactccatctccagtgatacagaaaatgtccagcctgttgatggtctctttcaattttccctcatttggatcgatcaaaacgatgtcataattttcttcagagagttgttttgcaagcttaaagcccactttcccatctcctataattacaattttcatcgcactttcctcttttctcacattactttttcattttgtaaattactcattgtctaaaccgataatcagcatgcaaattataacactttctattagaaagtcaagggaaatctttatgtaattttaatgtatttttacatatttttattttcttttaatatccctctcagccatctcttcacagcatacaaaacccaagaagatgtaccatatttttcaagagactattctctgattttcagatacaaaaagacagagaatccaggactgcttccgccgtctcagactctctgccagttccgtgatagatttctatttctatcactgctttcctattttatatacaatctactcttccgctgcgcgctttgcgatttctttctcttgtacatcagaaggcgcctgctcatatcttgcaaattcatactcataagttccgcgtcctccggtcatagaacgaagcactgtgcaatatccgaacactcccgtcatcggaatatccgcctcgatgatctgttttccaccctgcactggtgtcattccgagtacacgtccgcgacgtttgttcaaatctcccatgacgtccccggtgtactcatccggcacagtcactttcaatgttgcaataggctctaagagaaccggagaagcctccatgattcctttcttaaacgcctgcatggtcgcagtcttgaatgccatctcagaggagtcaaccggatgataagatccatcatacagcgttgctttcacaccgactaccggatatcctgcaagaggtcccttgcctacagattcctgaagacctttttcgactgccgggaaataattcttcggaactgctccccctacgactgtctcctcaaaaatatatggtgtctccaggtcgcctgatggttcaaatttcatcttgacatgtccatactgaccatgtccaccggactgtttcttatattttgtatcaatatcggaagtcctacggatcgtctcacggaatgcaactttcggtgtctccagcgtaacctctactttatagcggtttgccagttcgctgacgatgacttccaaatgttgctcacccataccatagagaagtgtctgatgattttcactgtcgttaactaccttgacagtcacatcttctgccatgatctttgccagcgcctgagatactttatcctcgtctcctttcgattttacaacatatttcatatatgtatacggaacagaatgatctgtctttggatatacaacctgcgtattcttagtggcaagcgtgtctccggttctagtcgcacttaattttgcgatggcaccgatatctcccgcatgcagctcctgtacttctaccggcttatttccctgcatggtatataattttcctggtttttcttctgcatctgtactcgtattatacagaacgtcctctccttttaaaacaccagagcatactttgacaaacgaatattttccgataaaaggatccaccatggtcttgaagacataggctgtctttgcctttgcaaagtcataatttgcttcatagattgcctttgtcgtacggttaaatccaacacactctctcttatccgggcttgggaaaaatcttacgatatctgacagaaggttggccactccctgtgccatcgtattggatcccattccaaccggaacaatacttccatccatcacatttactctaagcgcagaacgaatttcttctacggaaaattcttctcctgcaaagtaacgctccatcaagtcttcacttgtctcggcaaccgtctctaacaatgtgtctctgtatattttaaggtttggcagacaataatctggaatctcacattcttctctctgtccaatgcccgtatatcttcttgctgcattcttgatgacattgacatatcctaccagctgttcgttctctctgatcggctggaaatgtggtgcaataacctttccatatctcgctgtcaattcttccacaacattacggaaactcgcatcatccatatccatctccgtcacatagaccatacgaggcagattatacttatcacagagctcccatgccttctctgttccgacttccacacctgcttttcctgatacaacaatgacagccgcatccgctgcactgaccgcctcttctacttccccgacaaagtcgaaatatcccggggtatcaagcacattgatctttgccttttcccattcgatcggatataacgttgtatggatggaaaattctctcttctgctcttctttatcaaaatcgctgagcgtattgtgatcagaaatctttcccatacggttggtcacccctgatacgaaagccatcgcttccactaagcttgtttttccactgccgccatgtccaagtaacacgacatttctaatttcatccgttctgtaaaccttcatattgctgcctccttctagcacgtttttatcatgtgtatattgtactaaaaaaatatataaattacaactcttttatgtaatttatacaaattttatacaatatattctttttcactttaaagcatcatagctttgacaaatatgaaaaaatagcttacaataattcatataaaattttctgattgatatatactggaaggacatatgaaatatgaaagaaaaaattggttttatcggacttggactgattggaggatcgatcgcaaaggcaatccggcaatactatccggactttgaactggtcgcatttgataagcaaaaagaaacactggcactcgctgcccaggaaggcatcatcgacaccgcatgttcttcgatcaacgacagcttttgcaactgcacatatctgtttctatgtgctcctgtcgcctataacaatgcctatttggcacaattgaaaacctatctgcacgaaggctgtattctgacagatgtcggcagcgtaaagaattctatccacgaagcagtcaaaaagctcgagctggaagaatattttatcggcggacatccgatggccggttctgaaaagagcggatttgcaaatgcaaaagcaattctaattgaaaatgcatattttgtcctgactccgtcagaaaaagtctcgcaggagaaagtaactgcttacaaggatttcatcgcctccttgaaagcaatcccgattattatgaatgccaaggagcatgattttgtcaccggaacgatcagccatctgccccatatcattgcttctggtctagtaaattttgtagaacagacggatacggcaaatgaatatatgaaactgcttgccgccggaggatttaaggatattacgcgaattgcctcatcttctcctactatgtggcagcatatttgtctaaagaatcacaaacagatttctgagattctggatgcttatattcacctcctgatcgagacaaagaagtctgtagaaacctgtaataccgagcagctttatgacttctttgaccgcgcaaacaactacagaaattctattcctgacagttcctttggctgtatcaaaaaggaattcgttatttactgtgatattattgacgaagccggcggaattgcaaccattgcaaccatcctcgcttccaaccatatcagtataaaaaacatcggaatcattcacaaccgagagtttgaagaaggtgttcttcgcattgaattttacgaagaactctcctcacagaaagcagtgaaacttcttcagaagtatcgctatattgtatacgaaagataatacttcgtatggagaaacgcacttctcctttttcactcagattcatacctaaaatttttgaaacattttctttcagaaaggatttacaatggaacttaaacctacaacaaaactacgaggaaccgttactattccgggagataaatctatctctcaccgtgcggtgatgtttggagcacttgcaaatggtctgacagaaatccacggatttctccaaggggcagattgccttgccaccatcgattgctttgcacaaatgggaatttctatcgaaaataatcaagataccgtgcttgtccacggaaaaggactccgtggacttcgccgtccatcttctgccctggatacaaagaatagcggcacaacgacaaggctgatttccggtatcctagccggacagccttttgagacgacactttccggagatgcttctctcaacacaagaccgatgggtcggatcattaccccactctccatgatgggagcagacatcacaagtctttccggcaatgggtgtgcccctcttcgaatccgccctgctgacttgcatgggatctcttactcttccaacattgcctctgcgcaggtaaaatctgctatacttcttgccggtctatatgcagacagtgatacatccgtaacagagccggaactgtctcgtgaccataccgaacgtctgctgcgggcattcggtgcggagcttacaaacacaaaaacagatgccggagctgtttctatgatccagccatgcaacgaactttttggtcagaaaatttttgtacctggcgacatttcttccgcagcgtactttatcgctgccggactgcttgtcccacactccgagattgttataaaaaatgtcggaatcaatccgacacgcgccgggatcttatctgtctgcgaggctatgggagcagatatcacctacctttccaagaccaatgatggcggagagcctactgctgatctccttgtccgcacaagcgaacttcacggcaccgtcattgagggttcccagattccgacactcattgatgaaatcccgataatcgctgttcttgctgcctgcgcggaagggacaactatcatccgggatgctgccgaactgaaagtcaaagaaacaaaccggatcgacaccgtgacagaaaatttaaagaaaatgggggcagatgtcacaccaactgacgatggtatgatcatccgtggaaagacactccttcacggtgctgtgatagacagctatttcgatcatcggattgccatggcattttcgattgcagcactggttgcagacggaacaaccactatccaaaacagttcttgtgtggatgtctcctacccagatttttatagaacactttatcatttaagagaggaaaactaatatgagacgtgataaaatcaactactaccttgaccttgcagaaatggtatctcagcgctgtacctgtctgcgaaaacactatggcgcagtcatcgtaaaaaacgatgaagtgatctccaccggatatgccggtgcccctcgtggccgaaaaaattgcacagatatcaatatgtgtatccgtgaaaaattaaaaatcccaagaggagaacgctacgaattatgccgcagtgtacacgcagaagccaacgcgatcatcagcgcctcccgcgataaaatgattggaagttctttatatcttaccggaatcgacatgaagacgaacgactatgtcgaaaattctaacagttgttccatgtgcaaaaaaatgatcatcaatgccggaattgacaaagtatacatccgcgacaccaaagatgactaccgggtcatcgacgtggaagaatggattgcacacgatgaatctttagacggctcttatggatactaatcattcccagaatctggaaagaaggtgttcttctatgacacgtgaagaattatacgcatcaatctatacacacgataccatttaccttcctccttgggaagaacagtctgccccgctggaagtagcgctcggatgcagctggggaaaatgccggttctgcgactttgccaaagatacattttcccttcactccgatgaaaaaatcgaggaaaatctaaaaatactttcaaaactccaacccgagaatccccgtgtctttttccttggagaaaatgcatttgtcatcgagagtgagcgcctgctgcgcctgttctcccttgtacggacctacatgccacaagtaaaagaatttgcaatgtattcgcgcattgacgatgtacttcgaaagactcctgaggaactggaactgctcaaaaaagccggactctctgacctgcatcttggtctggagtccggcagcgatccaattcttgatgtaatgaataaaggtgtaacttctgccgatatgcgcaaaggttttcacatgctggatcgtgccgggatcggatattatgtcaccgtcattctcggtcttggaggtcgcacgttctcaagacttcacgcaattgaaaccgcaaaatttttaaatacgatccatccaaaagatatctggtgtctgaagcttcacctgttcccgggtactcctctgtatcgcgagagtaaacgaggacattttgatccaatgacacctgaagaaatactcagagaagagtatctgcttcttgaaaatctcacagtaaaagattgtctctttgaagatacgactgttttaaacacttacacgctgcgcggaagacttccggaacaaaaagaagaactgctgcgcgcgatggaatacttatctcagatggcagacacatagaatactcttctataaacaaagaatctcgtaagcgagattttccatgtaataaaaaacatgctcccttcccggcgataagcttggttgttccttatctgcccggaagggagcatatcattttcttttacattctttcttatttccgagttattgtttctatctgctttgttccaccaaaaattctgcaattaaatcgatgcaatcctgtacatcttttaaatccgccatttctgccggtgtatgcatataacgcagcggaatggacacaagtaccatcggaactccttggttggagaagtggatcttatctccatcggtataagtcatacgacttgccgcctccatctgcacttcaattccaacttttttcgcacaggctttcatttcctcattcaacttcttgacaaccattgggctattgcatagtaccggccctccgccaagtttgactgtaccgaaatctgccgcatttgttcccgaataatcgcttgtataggtcacatcgaccacaattgcaagatccggctgaattcttgtactcgtccagtaagcaccgctcatagttgtctcttctccaaccgtggatgctgcataaactccaactttgcaaccttctgcctttgctttcctaagtgcttccatgataataaaaacaccaactctgtcatccaatgctctggcagtcaatcttccatttgccatcctgtgtatttttgtatcaagaacgatcggatctccaagacttacataccgaagcgcttcttctttatcttccgctcctatatcaatacgaatgtctgatgtctttaaatcactcttctttgtcaactcccggcaagtctccacaacgccaggaatattcccctgcgcagtcttgatctgcacttgttgtccgagatatgttgccaaaataattcctccgcgggcaatcacctgaattcttccgtcctcagtaatattagagatcatcagcccaatctcatccgcatgtgcagaaagcatgattcgccttttcgcctctggattcactacacagattagattgctcatctcatctcgtctgatctcatcggcacagtctctcatctgtgtttccaccacatcctgtattggttcctcatagcctgatactgatatttcactcaaaagctgttctaaaaatttttcattcatatgttctaacacctttcttgttgtacctttgacaacagattttttcatgctaatacaactcaagtaaatcataacacgcacaaagctctttggcaaacagaatggggttcactttaccagtgtactgtgctataattatgtgtaaaagtttctaagtaaaggggggggttatccatggatgtcttaatgattatgggacttggtgttcttgcaggacgctttcttataccaaaccgtacaaagaaagggaatgaaatcatctcccttacatgcacttttcttttaattttttctatgggcgtgacattaggcagaaatgacaattttttgaaagatttatcttctttggggctgtcaagtttattgttctttttagttccaactgtcttgtctattctcatcgtttttattctaacaaaaaaattaatgataaagaaaactacgaaacaagaaaaagaggtcgaagaatgattgttttatttatgatttgcgcactggtcatcggactgctttatggaatgtctggtatcgattttacctttttaaacatcattagcgaaaacaccgatttggttttatatattttgatgttttctgttggaatcagcataggaatgcaaagagggattttgtcaaaaataaaggaatatcatctgaaaatttttattattccaatcggaattattattggttctttcttaggtggagtgatttgctccctgattttaaaaatgcctattgggtatggtactgctatcaccagtggtttaggctggtatagtctggcaggggtaaccattagcagcttagcgaatgtggaactaggaagtattgcttttatgagtaatcttatgcgagaaatgttttctttcattctgattccgtttctcgctgttcgcttgaattactatacttgtatcgcttccgcagcagctacaagtgaagacactaccttgcctctcattttgaaatacacaaatgaggaaactgtagttctgtctgtcttcaatggtgtcatctgttccctgatggttcccatcctgatttcttcctgtttgaatatgctctagctgcaaaggcacccactttttatcgtggatgccttttctttataatagttaatcatggagtaagcaatatttatttgttcagtcccatttcttctcttacttcgatgaagcattttacaatgaagtcgatatcttcttttgtatggcttgcacatacctgtgtacgaattcttgcttttcccttcggaactaccggataagagaatgcaacaacatatactccttttgctctcatacgctctgcaaattctgctgctgtcacttcatcatataacattacaggtacacatggatgtgttcccatgatgatatcaaatccgttgtctacaagttgtttacgatagtatgctgttgtttcttctaagtggtcacgaagttctgtactttcctctaacatattgaacatttcaatacttgcacctgcaattgctggagcaagagagttggagaataaatacggacggcttctctgacgaagcagatcgatgatttcttttcttcctgatgtgtatccgcctgacgctccaccaagtgcttttcctaaagtacctgtgatgatatctacacgtccttctacaccacaatgctctgctgttccacgtccgtgagctccgacaaatcctactgcatggctgtcatctaccatcacaagtgcattgtatttgtctgcaagatcacatacaccttttaagttacagataattccatccatagagaatacaccgtctgttgcgatcagtttaatccttgctccggcttcatctgcttctttcaattttgcttccagatcttccatgttgttatttttgtaacggaaacgttttgctttgcagagacgtactccgtcgatgatagaagcatgatttaattcatcactgatcacggcatcgtctgctgttaagattgtctcaaataacccaccattggcatcaaaacaagaagagtaaagaatcgtatcatctgttccgaggaatcctgaaatctttgcttccagttgtttgtgaatatcctgtgttccacagataaaacgtacagatgcaactccgtatcctctctcatcgtatgttctctttgctgcatcaatcagtctctggttgtctccaagtccgagatagttatttgcacacatgttgataacttctcttccgtcctccagttttacttttgcgctctgtggagaaacgatcggagcttctcctttaaataatcctgctgctttaatgtcttctacttcttttgtgtagatacttaaaatatcatttttacgtgccatgttgaaatcttcctttctttcagacaacttttttgtcgttttcgatcttaaaattcctgtgattgtgcctctaactgatctaagtcttcccagttcaggataacctttcctgactgtccggagatcattgcatcaaatcctgctttgtaatctttaatattcagtctatgtgtgatgatatccgagatgtccagtcctgcctgaagcattgtagtcatcttataccatgtatcccatactttacgtccgtaaattccgcggatattcaggccattccagataactgtctcccagttgatctgtgcatctggtctctgaagtcctaatactgcaatcttaccgccgtgcttcatgttatcgatcatgtctctaaatccagcttgtgctccggacatttccataccaacgtcgaatccctctgtcattccgatttccttcatgacttcttccaatttctcatttgcaagatttactgttcttgttgcacccagtttctttgcaagatccagacgatactggttaaaatctgtgataacaacgtgtcttgctcctgcaaattttgcgattgccgctgccatgattccgatcggtcctgctcctgtgatcagcacatcttctcctaatacttcataagaaagtgctgtatgtgtcgcatttccaaatggatcaaagattgcatacatctcttccgggattgccggatttgtcggccatacgttagcagcagggatgacaaggtattctgcaaatgctccatcgcggtttacgccgacaccttttgcatctttacagttctctttgtgcccttccagacagttacggcattttccgcatacaatgtgtccttctccggatacaatatctccgatgttgaatccttctacgccagatcccatctctacgatctctccaacatattcgtgtccagctgtctgtcctacggcaatggtgtgctgtgcccattcattccactgatagatatgtacgtctgttccacagattgctgtcttatggattttgatcttcacatcgtttgtaccaacttccggaatcggtactctttttaatgcaagtcccggagctgctgtttcttttacaagtgcccacattttattatcgttcatcttatttttccctccgtgtaattgtgattcagtattatcaccatttgtatttatcatactctattttgacatttttttcaagacttttttccgcatatcgcgaacatttttatttcgctgtccgcatagcagaaacacttgttttcttacaacattcaccattgacagagaagaaaaaacacgatacacttctgatataattgagtgcaatcagatgcccgcaagggataatagggaaatgagtgagattctcatacggtcccgccactgtgttggaggaatcgtcagccaatatgccactgggatactgggaaggcggctgacggtgttgatacctgagtcagaagacctgtctgttgcataagattcacacatagttacgagcgatgactaggtgtataaagagggtgtcataaatatagaagatctgagtaagtgacagcctgtatctggacagataccggttgcttcttttgtaaagctttcttttatgacagcccctttatcgcgcatacctgtctgcttttttgcatgacaggtttttattttgtaaaaattttctttacaaaataagcagcaaaatgcaggaggaataatcaatgaacaaaacacaaaagaaactcgtcactttatcaaccatacttgccatcggttttggtatttatcctgtcgcaaatgcaatgcacattatggaaggctatcttccagttacttattgcatcgcatggggcattctctgtattccatttctgatcgcaggattcttctctctgaagaaaacaattcaggaacaccggaagactctgatccttttagcaatggcaggagcttacgcctttgttttatctgcgctgaaaattccatctgtcacaggaagcagctctcatatgacaggaacaggacttggtgcgatcttgttcggaccatgtgccaccggaattttaggactgatcgtcctcctatttcaggcagtacttctcgctcacggaggtcttacgacacttggagcaaatacattttccatggcaatcgccggtccgcttctgacatttggaatctataagctctgtcagaaattaaaactgaatcgaatggtcacaatctttcttgcggcctctctcggcgatttatttacttattgtatcacaagcttccagcttgctctcgcctacccttccgaagtcggtggattttccgcttctttagtaaagttcatgggaatctttgcagcgactcaggtgccgcttgcaatcatcgaaggacttctgacggttgtcgttatcatgagtctggaatcttacgcaaaatctgaattatctgcacttggatacttcaaaggaggtgctgcaaatgtcaagtaaagcaaaatctatcattattttattactgctctgcgtactgattgccgtaatcccgcttacgatgagcaaaaataaaggctctgaatttggcggtgcagatggcgaagcagaaactgccatcacagaaatcaacccagattatgaagcatgggcttccccgattctggagccaccgggaggtgagacagaaagtcttctgttctgtcttcaggccgggcttggtgcaggagtctttggatatctgctcggtgttctgagagaacgtgcaaaacacgaatccaaagcagaatctcaacctgcaaaataaagacggacgactgttttttatttcctatattatcattttcccggaaaggactgtctatgtttgaaatcgacacactttgttatcattcaaaactaagagagaaaaatgcagagataaaagttgctttcaccgtgctgacactgttcatctgtgtctggaaccgctccattgtgatcgcagcgatcgtctttgcaactaccggatttttgaccgtatgtgtgggtggcattcctgctgcccgctacatacggcttttatgtattccgtttttcttccttcttttgagtactttgacagtggtcattaatttttcaaagacaccattgtcaggatatgcgatctgcctcggaactttttacatcacagccggaaaggatacgattctctttgccgttcagattttctgcaccgcattcggagctgtgtcctgcctttattttttatcactttccacaccgatgactgatttgatcgccgttttagaaagactgcactgcccttctctgttcatcgaactgatgcttttgatctatcgatttctctttgttctcgccgagcttgcctcttctatttccacagcccagaaggcacggcttggcaaccggaattttcgcacttccttttcttccttcggtgcacttttatccgttctgttcatccgtgccattcagaaatcgggcaggctgtatgatgctatggaatcacgctgctatgatggaacaattcgtgttctccatcaacagtatcctgttaagagaaaggaactctttctttgcatcggttacgaactattgttactctacttttcatggaaaggactgccataatgtcagaaacgattttagaagcaaaacatttatatttctcttatgacaatgatcagacacattctctcaatgatttttcattgaaaatcgaaaaaggaaagaaaattgcagtgatgggatctaacggttccggcaaatctacctttttcctctgctgcaacggaatccaccgcccttcttccggaaatctgttttttcacggaaaagaaatcggttattcccgcagagaacttctggagctaaggagtaacatcggtatcgtctttcaggatccggataaccaactcttttctgccagtgtctatgaagaaatttcttttggaattttaaatctcggcgtttcaaaagatacagccagacaggcggtctccaatatcatttccaaattggagatcacaccatttcaggagaaaccgacccatgcactgagcggtggacaaaaaaagcaggttgctattgcagatattcttgttatgcagccggaaattctgatcctcgatgaacctgccgcttctcttgacccgaaacataccgatattgtgcgggcattgatcgatcaacttagtgacaatgatatgacgattttaattgccactcatgatgccgactacgcatttgcctgggcagatgaagtggttctgatccacgaaggcagtgttttaaaaagtggtacaccgcttgatgttttttcagacacagaagcactggcacggaccaacttaagaccgccatcggtccttccgctttttcagacactgtgcaggaagcatattttatcaaaagaacttcctgtcccaagaactttaacagaactggaacaacgactggaagcattacccgatgatgcaaaaaaagcatccagtaaataaacaatcaccgaaagcaaaccatattttcatccatataaagtgaggactgtattatgaattttatcgaaaaaaaagcaatccttgttgtcagctttggcacaagtcatgaaaacacccgcgcagttacgatcgatgcgattgaatctgaaatcgcatccgcttttccagactttgcgatttaccgtgcatggacaagtgggatgatcatcagaaaaatcctgaagcgtgaccatgtgaaaatcttcaccgtaagcgaggcgatggagcagatgcgcgcagatgggatcacagatgtcattatccagccaacccatgttatcaacggaattgagaatgatctgatgaaagagcatgccctctctttccgtgacgcttttcgctccatccggtttgggactccacttctgacaagcgaagcagataatcgggccgtgatcgccgcagtgaccgagacgttctcgtctctctccccaaaagatgctctcgtacttatgggacatggaactacacattattccaatgcaatctatgctgctttggattatcaattcaaagagatgggatatccaaatatctttgtcggaacagtagaagcttatcccgatatggatacgctgctgcgcctcgttgatcaaactcacccagagcagatttatcttgctccttttatgattgttgcaggggatcacgctgtaaacgatatggctggagaagacgaagagtcctggcaatcacaatttcagtcacttggatatccggtgacatgcatcttaaagggacttggagaatatgaagcgatccgtaaaatatttctccaacatatcgaaaatgcactggcagaagcataggccattttagagctgtatactccctggtgatctcaaatgcaacacacgccttgtaaggctgcttttcagtctatacaaggcgtgtgtttctctttattttccatctctctcaatcatatacaacagtgcattgcagatacaagccgcaatattgcttcccccttttcttcctctcgccacaatatatggcactccagcttccataatcagctctttggactgcaccacattgacaaagcctaccggaactccaatgaccaatgacggagaaattttcttttcctgaatcaattcatagaggcgcacaagcgctgtcggagcattccctactgcaatgatcggatgtcctcctaattctgccgccttctccatgctgactaccgcacgtgtctcttttcgctccttggccgtagccgccacgtcttcctctgccataaagcaatagatttcccctcctagtttctgcaagatttttttattgacccctgcttttcccatgtttgtgtcagtgatgatcgcttctccccgcttcagcgcagcgagagctgtttccaccgcatgctctgagaagaccaggttgtctgcgtaatcaaaatctgcacttgtgtggatacatcttttaatgatcggctcgtgcagtttcggaaagctccgcccgcccagttcttctcctataatttcaaaacttctcttttcgatttgtgccggttctactttttctaatgcaatcttcatcgatatctccttttctcagttttgccagattctatattcctgtctccaaaatctcatagattttttccatatccagatgtgcacgcaatccttctgcgagaagatcatactgcgtttctttaaaagctgcaaaatccacttgttccaaatcggaaagtgtaatcccctttttctctgcaagcgcttctaagattgccggcacaacgccttccccatcgaaaatgccatgcacataagtgccatatacattttctttccagcacccatctgccttctccccttctttttctagttggaatgcttctcttttatgggatgtttcctgtaattttgtcagcgtctgccctcgacatacggtctgtcccatatgcacctcatatccataaagcggaattcccgcaagcctttttaatgttcctcccggcatactaaaggttccttccaccctagttcttgtcttttctgtggaaaatacagtatccaccggaagcagtcccatcccctggatcgttcctccagcctccatctgctcgggatctttgatcgtctccccaagcatctgatatcctccgcagatcccgaaaataactgtcccttttgcgtgtgcttttaagattgctgcctccataccgctttccctaagccatctgagatcttccattgtattcttgctgcctggcagaatgatcaaatccggcttctgcaattctctcacatgttccacatagcggacagacgcttcctttgccacttccaacgcattaaaatctgtaaaattggaaatcctcggaagacggatcacggcgatatcaatctttcctgccgcctctttcatccaaaaccgttcggtcagactgtcctcatcgtctaactgcacctgcagatacggagcaactcccacaaccggaatccctcctttttcttccagcatcacgacacccggatccaaaatcgtcttatctccccggaatttgttgatgatcagacctttgaccatctgtttttcctcttcctccaacaaaagaagtgtcccgagaagctgtgcaaacactcctccacgatcaatgtctcccacgagaagaaccggcgctttggccaattttgccatacccatattcacaatatcatcttgtttgagattgatctccgccgggcttccggcaccttcgattacgatgatatcatattctgcttccaatttttgataggcgcgcagaatatctgggatcagttgtttcttataagcaaaataatctctggccttcatcgtaccgatcacttctccatttacgatgacctgagatcccatatcgttggtcggttttaagagaatcggattcatccacacagacggctcaatccctgccgcttccgcctgcattacctgtgcccttcccatttccagaccatcttctgtaataaaggagttcagcgccatgttctgtgatttaaacggcgcacaccggtatccgtcctgccgaaagatccgacacagccccgccgcaatcaaactctttcctgcactggacatcgtgccctgtatcataattgcttttgccatctttctatcccttctatcagctttttattttcatttctcgtccgcactgccacacgataaaacccttccgagagccctggataattctgacaatcccggataagaatcccctgcctgcggcatccttcacacatccctttttctccccgaaaaaaaatatagtttgcctcagatgcgtagcatttcatcccaagccggataagttcttttctgagatatgccttctcctcccgaatcaacgcttttgctcttcttacatacgcatcctcttccaatgccgcaattcctgccgcctgagccggaactgagacattccacggctgcactgcctgttccattttttctagcaattccttgttttggcaaattccatacccaagccggagccccggaattgcatagcgctttgtgaatgctttgagaagaaacaaatttgagtataaccctgtcatttcctttaattcaaatgcttccgcctcctctacaaaatcgaggaaacattcatctacaactaaaaaaatctgtttctctttacaccggttcagaatctgtatcagaagatctctctccgtcaaaactccggtcggattgtttgggttacacaaaaataccatatctatctccccggtcagcacctgcaaaaaatcttctgtgagccggaatccattttcttctgatagtgggtaatagaaaacttcacagcctgctgccagaagcgcctgctcatactctgcaaatgtcggctgcggcaggagcgcccgcttcggcctgagactgtatccaagcgcaaagatcagctccgccgcaccatttccaatgatcagcgcctcttcttccatctgctctgcccatccaagccttttttttaactctttgcactgcacatccggataatgtgcgatgtcatttacacacgctgccaccgccttttttacactgtccggtggtcccagcggattaatatttgccgagaaatcgatacaatccggattccggtaaacgtctcctccgtggatcagttttctcatattctcttctcctgcctttcttctcttgatacttccatctctttttcatgctttcttacagacaaattcctatatacagcatagtaaatacaagcactgcaatcaccgctgttccatacaacatctgatttgccctccggatatcttctgcctctatctttcgtttgtcatctccgattgtcggcttttcatataattttccaaaataccatgcatttcccgcaagctgcactccaagtgcccctgccatgacagcctctgtctgagcagaattcgggctggcatgatttcttctgtctcttctgtaaatccggatcgcatctttccagtgatgcccttctaccgccgccgctgcaaccataaaccatgcagacatccttgctggaatgtagttggcaagatcatccagtttggcggcgcaagttccgaaatttttatatttctcatttttgtatccaaccatagaatccatggtattgattgccttataaaagtaagctcccacacctcctgcaagcatcatatagagcagtggcgcaatcaccccatcggaagtattttccgcaactgtctctaccgcagcttttgtgattccctcctcggtaagcgcggcagtatctcgtcccacaatcatcgaaacagccttcctcgccccctcgacatcttctgcctgtaatcgttcatagaccttcatgctttctgttttcagagattttgtcgccagcatctgccagcacatacacgattccaggataaatcctgctgcaggatgcagacggtatgcgagaaataaaagccctcccgggatcagaacacacccgctcacaatgcaaagtacaagcactcctcccgccatctgttcccctctttttgtcttcgggaaccacgcccgcagccacttctcgcaggcagtgatggcatttccgatcatacagaccggatgatacatccatcttggatcaccaatgcaaagatccataagaaaacccgtcagtaccgcaggtaagatccaatttcccattcttttctaactccttttctatataaatagaatatccgcacagatttttaacatgccattcataaaacgacttttcaaacgctgtgacggtctccatcaaattcataatcacaccaccgtgtgtcacgacagcggcagactttttttgctgctcttggcagacagaaatcactttcttccagcccaaaagacaccgactgcgaaacccctccctgctttctccaccgggaaaaggaatcgttgcattgctgtcgatccacctctgataagcttctgttttggacagttcttctgcatttttgccttcaaagattccaaaatcacactctcttaattcttctataatataaatatcctggtcgggatataaaatttctgccgtctccacacagcgcttcagcggactggaaaacacaatctccggcatctcatacatacactgttctgccagttttcttcctctctcactaagcggttcatcggtgatcccgatgtacctgcgctcctcattgccccttgtcattccgtggcggaccaaatcgatccgcatcggtattttcttctgttctaaatttctttctttcatatttctccatcaatttacaaggaatctatcactgtttctatttgtcgtcttgtgcgatttctatttcccttccatcttattttagtacaaccggaattccacagacaacccgagtgacctcgtcggcatgctcagccagttctgtgcagattcttccggtcagctcccgccaactgcggtcaaatggatcgatcggcacaattccataaccgagttcatttgtcacaagaacaatccctggattttcctgcaaaagctttggaatcagctgttctcttacatactgctcctttccttcctgcagcagcctgcgcaaatatagatgaaaatctaccattccttcgcaggaaaaaatttcttcctcagggcaagtctccccgtttgcccatttttgaatagagtcatgttcttccgcataggcacgctttccctgataggctcctccaatcactaatttcatctgctctgcctccttttatctcttccatcgttttaccggaaaattcctccaccgatcactgccgacaacagaatccccagttcacagacttgcagaaaccatcctgccagatctccggtaatgccgccgaaatttttgacagacattttataatagtagaaaaatatccccccggctgccacgacagccagaagccctgaaagttttccgaccacaatcatcagcactgcaagcatcaccaaatagacggccattgtatttcgtacgatcttcttttttgcacgatcggcaaacatcgcagcaagtccgcttccttttgccatcggaaaagtaacgatagaaagtccgcttaagcttcttgacatcaaaaaaccaagtccgactaccgggatgagctctgtccgcagactcgtcattgcaccacaagtcaaaatcagatagacggcacacgaaagaatcgcaaatgcacctgcatgagagtctttcaaaatttccagccgccgctccttttcctgccacgagctgagcgcatcacacgtatccagaaaaccatccatatgaatccctccggtcacaaagatcggaagcactgtcaaaattgccgcataaaacaattcgtgataatagattccgcaacttgccagccactcttttacattccacactcccgcaaagaaaagtccgatcactgcgccgatccatggaaagaagcacatgacataccgcatattttcctccgtccagtcgctttgtggaaccggaagctttgagtacatcgagcatgcgattttaaaactttcatacagtctttttcccttttccatcttccctatactccttcttccttctttgcttttaacttccacgggattccatagataacttctgtaacctcatctgcctctgcagccagtacctggttgatcttcgccaactgtttttgatactgtatcgtatcgggatcatagacgatcccatcagaaaatacttcatttgtcacaaggaccaaatgcgctgcctgcttttggagcatatggattccctgaaggatttcttctactgcccgctccttcgccccatcctcagaatacatttcatttgccaggaggttggacatgcattccagaagtactacacattcctgtagtctttctccagtatcccagtgaccatctgaatgttttccatctgtgctttccgatggcaagcgtactgctttcaagtttgtataacattcaattgtctcaaactgcttttctgcccgcattgcccgatgtcttgcaattttttgcttagattcttccccgaaaggatacatcgtcgcaatataataccgtttttttccaagttccattgccagcgcttccgcaaaagcagattttccgcttccgcttcctccggtcacaatctgaaacatctacttcaactccttataactttctatcgaaatctccccgaacgtactcatctttttgtaaacgtcctccgccatctgaagcaacggaaaaatcgctaccgctccagttccttctccaagacacatctcacatgtgagcagtggcttcttgcccagcgcttccagtatcatctgcatcgccggctcctttgacaaatgtgaggctagcatatatgccttgacttccgggcaaatagtcgctgccagaagggctgccgctgccgagataaatccgtcgatgatcaccggaattttctttgccgcccctcccagaaagacgcctgccatccctccgagatcaaatccgcccacttttgcaagaacatcgatcccatctgtccggtctggttgatgcaattccactgcttttttgatgacttcctgctttcgcttcagtgccgcacttgtcagtcctgcccctctgcctgtcatctcttcgaccggcttttctaacagtactgctgccactgcgctgcttgttgtcgtatttccgatccccatctctccggtggcaagaatctcatatcctttctctgcgagttcctctgccatacggattcctgtttctatcgcacagactgcctgtgctcttgtcatcgcccactcccgcgccatatttttcgtgccgtatgcaatcttttcatttcgcagcttcgtatctcttgcaattccaatatccaccggaaacaagtctgcccctgccgccttacacatgattgccgcacttgtgtcaccactcaggaaattttccgctacaaccgcagtgacttcctgcccggtctgggaaattccttcctccacgaccccattgtcggcacacatgacaataagcgctttcttcccaaaatgtacctcatcgcttcctgtcattcccgccgtctgaatcagtacttcctccagccttccaaggctgtgaaggggctttgcaatactatcccaccgcttctgacactgctccattgccgctgtatccggcggacatatttttttcattgtttctttcagaagttttccttctgtctgaagggactgtgctgacatctcttacctctttctttccttgcattttttaataaaaagttctgcgatctgtggatttcccccataatgaatatgtggataccctgccagaatccgctctcctgcatgcatacatctccaggatcgttcactgagtggtttcactgcgagaaaatcgtctccacagtttgtagagtcaaaatagtgaaattcatgcgcggtgatcggatctgtcttttctccgaacacagtcccttccgtcagtgtcacatacccaaacctcgaaagttttccggtataaaaagtatttcccggaaagatacctaccatcggatattcctttccttccatatctttcaaagtctcatgcagatacataaatcctccgcattctgcaatgcagcacacaccctgccgaatcgccgcgcaaaccgccgtccgcattgatacatttgtgctgagcctttccgcaaaaagttccggataccctccatacagcacaattccttccagttctggcggcagttcggtatcatgtattggtgaaaagaaacaaacttctgcccctgcccgacgaagcgcttctagattttcctcatagataaagcagaacgcctcatcttttgccaccccgatgcggactttctctctttgcacaatgctttttccccttttcccttgatctccttttcttacaagatcctctttcttctctgccacagggatgtcctccgcctgcgctgccagttttaacagtccatccagatcaaccgtcttttccatctgttctcccaacagatgcatctgctctttcaactctttgatctcttccggaagtttcagacccagatgcctgctttccagtttgaatcctttcagttccggcacatatccgtacacctgaattcccaactgctcttccaccatcttgcgaagtctcggatacagcattggggatacccggttgaaaatcactccctcgatctgattgtctgtttgataggtaaggaacccctggatcaaggctgtgactgatacactcattccttttccatccacgatcagcaccgccggtgtcttcgtccactttgccacttcaaacgcacttgcgcgcgtggaaattcctgcaattccgtcataataccccataaccccttccagaattgcaatatcacaatctacagaagtaagttcgcgacagatctgctcctgatttaaaaagaatccatccagattccggcttttcgctccaataatctttgtatgaaacatcggatcgatataatccggtccacatttaaaggaagccaccgcttttccccgtgcctgcaacgcctgtaaaatcccacaggtgatcagtgtttttccactcccgctcgcaggtgctccaagcagaaatcgtggcattttttctcctttcatttatctttcctgcctttctcctccaaatgaaatgacatagaccggattttgtcccatcatcatatgatatcttccgacttcccgtgcacgcgccgtctgaacagagacaacctctgcaccggaaatctcctgctctttcagataagtaagcgcctctgtgacggtttccaaggtaattgcattgatcacaacccggaccgctttattttttttgcggacaatatccagaatttctttgagatttcccgaggaacctccgataaatacatgtgtcggggcgggaagattttccagtgcctccggcgcttttccgtgaacaatcttcaagtgatctacagcaaatgccactcggtttttccccagaagcgctactgcctcctcatttttctccaccgcataaacgacaccatcgggagcctgcaacgccatttccacagcaaccgatccggttcctgcacccacatcatagatcacagcatccttccaaagcctcagcttagaaatggagatgcttctaacctcttctttcgtcatcggaacctttcccctgcaaaactgctcgtccggaatcccgcaaacgacctcacgccgctctgctctccgattccaaattagaaaaactgcgagcgaatcggtttccaactcacagaattccctcacatttccctgaaaaattcgctcctccggataagaaagtctctccccaactgcgattttgcagtctccaaagccgtacgctgtcaatctcttacaaagttctgcaatctgattctttcctcctgccagcgcaaaaaccataggatgttcccgtacaccggaaaccagtccttcctctctcccgtggacactgattgccttcactttttcccatgggacatgcagcttcgcacagaaatagacaagagacgaaattccgggaatcacgcggacttccaagttctcctcctgttcttttacatggccaaggaaatcctttgctccactgaaaaaaccaacatctccagaaagtaccaccgcaacattttcgtactgtggatgttctttgatatattccaatatttcctccgcacggtaggcgcagaaaatctgctgtccttcttgtctgactgcctctgtcatccgcttcgcaccgatcagaagatctgcctccctgcatgtacggctggcttccccagtcatcgtctcagcagatcccatcccgattcctacaagagatacccgtcgccttctgcctttttccgactgatctctcatttcctttgttcttccgtttgtttcctcttgaaactgtttttccagcatttctttgcactgctccaaagaaagcccttcttccttctttggtcttcctatgatcacaagcggaattccaagctgttctgctgcctgctccttctctcgaaatccacctgctgttcccgactcttttgtcacgacataagccgcatgacactgtgcaaacattgcttcattcaatgcttctgaaaacggtccttgcatgcagattacatgttttccacggattccaagcttggcacatacactgataatctccggagccggcagaactcgcgcgtaaacccgctcttcatagtcaggaatcccggtaaatgctccaagctccttacttccagtcgtcaaaaagatatttccggctgtccctcttaagtaccgggctgcctccgcagcagaatctacatagatgttctttccatattttttatattcttcggattttctgacaactctgatatatgttcttccacttttctcacaagcagttcgaatattttttgtcacttccaccgcatagggatgagtagtgtcaatgacaacttccggccccttttcttcaaaaagtttcctcatatcttcctgatccagtctcccgcggtgtacttccagctgtgcatattcttccagaacagattccccgtattctgttgccacacagatcatggctggaatctgtctttcctccagaaatgctgacagttttctcccctcggttgtgccggcaaatactatcaccctacacattccgatatcctctcggtgttaccatcatctcttccagtgacatcgtctgtgaattaccgataaatactgttgtaaacatatcaacctgctcttccttcagcgcttctaacgacagaaccttcttctgttccccggttcttccgatattgaccacagttccgcagacaatgtccggactctgatactccagtaaaatctcacaggcccgccgcagataatcttttctctttttgctcgaagggttgtaaagacaaatgacaaaatctgcctccgctgcagcccgcagccgtctttcaatcttctcccacggcgtcagaagatcactaagactgattagacagaaatcatgcatcagcggcgctccaagtaccgctgcccctgcggtagctgccgtcactcccgggatcacttccaacgctacctcgggataacgcgcacccatctcgtaaagtaaccccgacatgccatagactcctgcatctccgctgcagatcattgcgaccgtctttccttccatcgccgtctcaaatgccatttcgcatcgtttgacttcctgccgcatcggtgttgtcaaaaattctttctctccaaaatgttcccggatcagatctatgtacaccgtgtaaccaacaatgacatcacatgtctttaatatctccgcagcccggattgtcatctgttcatagtttcccggtccaattccaacaatatatagtttatacaaaatgaatcctccattctcttacagccagtgccgctgtcacaccatccaccgctgtctttctttgtatcaatttcccgccgtcacttgcaagaagtgcacttctctcgcacacgttgtctactcccgttgtctcttttacaaatgcagaagaagtaaaacttccctccacatcgtttaaaacttctgccggatagaccgcaaacggaatccctgattccctgcaccactctaaaatgccctgctccctcgctttcaagtcaatactcgccacccggctgattgcttttttgtggatatccgcttccttacaagcctcatgcacacaccgatcgatcttttccttatctgtccctctccggcatccaattcctaccgtcactgccttggggatcagcgataatactccttcttccccgcatcttttaattccgatatagattcccggacgtgctggctcttctgcaaaatcctcgcagcagtaaagtccttccggaagaatctccggcaattctttctcacaacatatcgggatcttttttcccgcaagcaatgctgcggaaatctcttttgccagtttcagatcagaaatctctaaatcattttcttttgcaaacaagtcgactgcaaaccgtttctttctgtctgtcgccgtcgtaatgaccggaactgcatccactgcatctgcaatccagagtgccaatgcattggcaccccccagatgccctgcaagaatcggaatacaaaacataccttcttcatccaaaacgatcaccgctggatctttcgctttattttcgatgaacggcgcgatactcctcaccgcaatcccgacagcaccgacaaacacaattccatccatctgccgcatccatacttgcacctgctcttttagtttccccaaaatggccgttgccctcattgtttctggcacctcttcttccatgacataccggctcttcacataacgagaaacttcatatgcggtattttttgccagtgtttctatttgtcttgcaagccgggtacccgcctcggtaaaactgacgatcacaagccttttctttttgctttctatttttttttgctgctctgtcaatgcttcttactttgtcctttctcgctcacttgcttcctgacttctcccctctcgaaattctgtcgtgaattccggatggtataaatccgatctgcgatactgctgcggcaaaataacatcacctacaatgatcaacgccgtcttcgtgataccatgttccctcgcggtctgtgccagacttcctacagtacaaacatatttctcctcgtccgcccatgtagctttgtagacgatcgccgcgggagtattctcctgataacctcctgcaaccagcctccgagacaattcttctaacattccagtgcttaagaaaatgaccatcgtcgcctgatgagctgcaaacgactcaatcgactctttttccggtactggtgtccgccctgccatgcgagtgatgaccacactctgagaaatatccggcagtgtgtattcaagattcagcgccgccgctgcaccgcagaaagaactaacgcccgggcagtaatcatagacaatccctttttcatccagtgcatccatctgctcccggattgccccatacacacaaggatcccctgtatgcaggcggacaatttcacaccctttttgatcgccttcttccatcaccgtcagcacttcctccagtgtcatctttgcgctgttaaagacttcacatccttcttttttctcatccagcaactccggattgactagggatcctgcatagataataatatccgcctctccaagcagccgctgtccccggacggtaatcagatctttcgccccggagcctgcccctacaaaatgtatcataattcctttttctcctttacaatgatcagtgaatagtaacctgcatcttccgggatttcatcgatagtactataaattttctctcccggcatcccgcaattttcaatcatgactgccgtggcatctgcctgcttcaacagttctttgacatgtcccatctgttttcctgccttcatcaatacttttgtccccggaagcttcaatgcttcctcgatctgatacgatgcaggaatgatgtgcagcatttctgatttttccaccagtcccatattcagccgcgctgccactgcacagaacgatggaattccattgacgatttccacaggatagcctgcttctgccactctatggtgaacatagaggtaagttgagtagattgtgacatctcccagtgtcaaaaaggccacctgctttccttcccttaaaaatacctcaataacctctgccgctttctgatggctctcttctaagcgcaccggatctttcgtcatcggcatctttaccgcaacccttgttttttctgtgatctccgggaataccgggagcacaatctgatatgccacacttttttctacatctgttccgggaacaatgatcacatcactctcccgcatgatccgcagtgccttcaaagtcagaagttctgcctctcccggtcctactccaattccatataattttcctatcattcctctattgtctcctcattttctgcaatcttctttaaaaatgcttccgcgcatgcggtctctccaatcttccctatcccgctggaaaatacaatcgcggcagttggcagttctccttttgtccgccattcgagataatgttccatccgcgccatcagctctttcattaccgcatcacgttcttctctgcccagaagttccaaagcctcttccgtcgtcgtacagtccagaatcttccggaccactgcaggatctatccctgcccgaagtcctgccgccccgaaaatttccatccttgcatctgcacaccgggaatgtgtgttcataattccccccgccactttcacaaatttaccaagatgcgccacaaataatatcccttttgctccaaactgcgctgccagatcaatcgtctccccgacgaaattgctgcatttgactgcacggtccgggctgatcccataagtttccttcagaaaatctaacccgtaatttcccggtgcagccaaaagccaaccgttcccatttgccagctgcatctgaatttccacacggatcgtatcgatcaatgcctgttcactcatcggttccacaaccccacttgtcccaagcacggaaatcccacctgtaattccaagcttaggattgaacgtcttcttcgcaagctgttctccttccgggatagaaatgatgatctcaagtcctccttcgtatccataacagtcgcagatctcctctgcctcttttctgatcatctgtcgcggcaccttattgatagcggcagctcctaccggctggtccaatccttttttggtcactctcccaactccgcgccctccgtcaatttcaatttccgttccatcttttcttctgaccgatgcatagacaaatataccgtttgtaatgtccggatcatctccgctgtcctttctgacggcacagctgacacgctcaatcttttctccctgccttttcatctcaatctcacagacaagaagcgtcagttcctttcctttcggtagaaccacatccaccgatgttttctcttctccggaaagcaacatccatactgctgcttttgtcgcagcctgggcgcatgtccctgttgtatatcctgcgcgaagcctttttttctccatctgtccatctccttttccagtcttctaaaaacaaatggcccatctctcaacaataaaaagacagcctttcggctgtctttttatacacggaaaagaaatgcttccgcatctctcataaaatcattttgtaaaatcattctaagctgtgtatactcttctcctcaccgaaagatgttacttacctattgaccgatatcctgacttaggactaaaacctacttcctgcccttcccgcatccgaaactcatccgaacacagtggtatgcagggttcgtcatcccttacagtagagtgagctgttgcggactttcaccgcattccctgtttcattggcatctgccaaagtcaatatacggttattctacaaagttttgaaaaacctgtcaacttaaaaatattggatcgtaactgatttccccatcttttcggcaacttcttccagctgttcaacgagattcatgcgaatactcagatcaaatggaaggttagaattccggtgtgccacattcattgcctttccaacaaacagatgaatctctgtgcattcctcaatcagcattttggcaagtttggatgctccattattcttgtccagctcctcaaaaaatgtggcgtcaatctccttcttcacatattttttcaagagcttcaacgccaatccaagcgtcagtactccttctgtcacaaggtcgattccttcgatgagcgccatcggcggcactttcggatcatagtctttcaatgaagtgtaaatttctttgccaagcacccttgctgtaatattggcgcttgtccctccggataccaccttttttccttcctgcttcatgaacgacttcacaaccctctcatcgtcctccttattctccggcggcccggtaaaaatattgacgatctgccgcgggatcacatgcataacagcaactgtcgtatcgtctcccggacggtgcccataaagttcatcacaggtatctgcaagcgaaaccgccaatcttgatgcggagatctcctccgacaggcagcggatcgccgccttcgccatactgtcccatgtccagccaaaattcaggaaatctcccggacctgcatagagcaccccatcactcatcagaacaaagtagtcacccaactctacccggaaacgatattcatggatttgctttccttctatattccgctcctcgtatggataagactgtactttatgatcccggataaaaatacagcttggattgtcaaattccaccagatatgcttctccattccgaaaaatctggagaatgctaaatgttgcataggcaacttcccttactttacagaccggtagcgtctttgcgatcgtctccacacaagactcgatcgtcgccccgttaaacaacattgttccaagaatctttgaggtcagcgtagccagaatattcgccttgacaccgctccccataccatctgccaaaatcacaatatccgaatccgcagtctttaatacttccactttatccccgcatagctcctcgtggtgcttattcaggcttttccacgcaacatctacactgattcccatggctagtccccctctccatcaaggagaatcgaatcccgaagctttgtcagagtcacttttgtctctgcagtcgtctctcctaacagcccggcaatttcctgtgcgaccatcatctgtttatcaatgacacgctgtgccatctccaccgtctccattttcagattatagtgtttctcttttgctttttcttcttttgtgatgtcctgataaataatcagcaccgactccatctccggaatatatatgatcttttcctcagctttcatgcctaactgctccagcttcactttcttgtatgtaatcgactctctcgtctggaaaacgtcctctacatctgctgtatccacaaagtcatacagatatctttccagcgcttcttctctgctgatttcgagcagttcctgtgccttcttattgcattcccggatccgcatctccctatctataataaaaataagattcggtgtcacatccatcactacattcgacatggactctgctttggaaagtgcatacggcagacacatactattctctgctttcttctgaaaaactgcaatcgccttctcccggcaggttgcgtatccgcacgcaccacagtttaattcatccttctcagaatactttcccgtctctcttaaaattgcagaaagttcctcctcggtcggaagctgctcttttggcggatgcggcgcaaattgtctggaaagttcgacttccaaagactgtggctcatattgtgccttctgatgggcagccactctccgctccatctccacttttgccttgataaacgacacattccattttccagatgctggtcccttgacacagccaccatcgcagacattcgcttcgataaaacagtgctccaattcgcctcttttcaaactttccagcatttccatacaattgtccagtccatcgacatacactttgtggtattgttttttttcttcaccttgctctttctcccgcatttcggaagaatccaccatcacagactgaaggaccccaccactgaccggataaagacggttcacaccacaatccgggtttgccatcggaagatcttcacattcttccagaacaatctgttcttcctccagccactgttccaattcctcaaatgtcagaatcgcatctactgcgccaaacacgcgggaatctcctatcgcctcctgctttttcgcaatacagggaccaagaaagacaacctttgtctgctccccatacatttttttgatcagtcttccgtgcgcgatcatcggagagacaaccggagcaagctggtctgtcaattccggataatacttctccacaagttcattcacacttgggcagcaagttgtaatgatatttttatatgtcccttcccgcagcagtttctgatactctctcgtgacaagtgccgcaccttctgatgtctcccgcacttcatcaaatccaagcttccgaagtgctccgacaacctgtcccggcgtccgataattcatcactcccaaatacgatggtgcgattgatacgacaatcttcatattctgtcgaatataggctttgatcagttctagatcacttgcgaaacgctttgcattctgcggacagacttccaggcatttcccacagtgaatacagtgatcattcataatgtgtgcctgctcatgtcggacagagattgccttgacactgcaatttctcacacatttataacagtgcttacagctcgcattctgaaaatcaattactttcattccattcactccattcaaaaaaaggacctttcccatcgcaaggtcccttctttttgttattcatattttgcaagaatctcttctacatcttccgctttcacatggttgtacacatcgtcattcaccatcagaatcggtgccatgccacatgctccaatgcaccggcttgcgtccagcgaaaattttccatcggcagtacattctccaccaccgattccaagtacttccgtcagcttattgtagacatctcctgctcccttcacaaaacatgccgttccaagacagatcgatacctgatattttcccttcgggctcaacgtaaactgtggatagaaatcaacaacctcctcaatcttgtgaagcgggatatccatctcatccgaaatgatcgtctgtacttccgtaggaacatatccataaatctcttgtgcctgctgcaatactgccatcaatgccccctgttcgctttttctcttttcgatcacttcacgcagtaccgtctcctgttctttcgttccctgaaatggaactgtcgacttatttgccatctgaaaaacctcccttgttcttataactatgtcagtatactgcattcatcgtatcataaataggcgctttttgccatatcgtttcaaattttcatacaaaaaaacagtcggaaatgctatcttatcacatttccgactgcgcctcatctaaaaaatgatttattcgtctttctgcgtatcgtccttctctttcttggaagattctgcttcggaaagttctacttgagaagattctgtttcgcaagattctgtttcagatttctgaacttctggttcttcctcggattccttctgttctatcttctctgaatcatctgatttttctgcctcttccacaggtattacctctgtttcaggcatttcctctgtttcagacgcttctgctgcaccttgactctgtgcctcatggatcttgttccagtcttcttcttctttcttcaaaagtgcttcttcttccggatccgggatattctctacaagcggaagcgccggcaatatctgtgtcttctcttcttccagaccttctaaagatgtctccgccttttcttcctcatctggttgtgattctgacagttcttttgcttcttcctcaagttcagcaagttcactgtccagttccttctccagctctgggtctgcttcttcagaactaatctcttctataattcccggaagttcccctttctctccacgaatcttctggcgtttggcttcgcggatttttcttgctctcgcctccatcagcataataatgatcaaaccgatcagcgccgcaagtgctacccctgctgccacaagtaccggtgtcggaagcttcggcaactgaaaagagtgtttcttttctttctctgtattctttgacacttcttttttatcttctgtatcttctttttctgtctcgccagcagctttgtctttctcttttgcgagcacatattccccgcctttttcaaagatcaaagttaccttatcccgatctactacgatctctgttcctttgtccagattgcttctctcatagaggaacaatttctctgcaccttttaactgctctggaagctggtagataaccgtcactttccccggaaagtttttgctcatcatgaattccaatacttggtacgcaccgattttgtccgattccttcttggaaagcgtaacatttttctcgataagttttgtaaaaagctcattttccggattctttatatctgcccctttgatcttgatggagtaattatcgtactctaacgtcagctcaaagttcggatttttagaaaggacagtcaaaatttccttatcaagcttatatggcttacttccgttgacaagagaattgctcccacccttgatcgctgcattgatattctcaagcaatgtcggttcagcaatacttcccactgtgtttcccgctgaggttccacctgaacttcctgtggactgactcttggaaggatttctcgttgtattctgattctccgacccgctgttgtccgtagttccttgtgtattgccctgctggttcccatctggtttcgatgattgattctcctgcggcggatctgtctccggtttctctggctcttccggttctgccggaggttgcggatctggattttctggctctactggagggttgggatctggctctaccggaggttttggttctggattttcctccttcggaacatccacagatgtgatcgttccatttccggtatttccataatacactttcccatcatctccaatcagaagataatcttctccatttttcttcgtctccgaagtatagacggtctccaccgtcatctttttgtctgcgtcaaacttggctacatataaatttgcatagtcttcttcctgtgtaaaatacacatagaaattctcacctgattttgtaactgcctggctaacgaccggatgatctgtcttctgtgacagaatctcagtagcatcagattcagagtacaccgctatgtaaccctgaccgcttccgcctgtcacaaacaccttcccttccagaatcgaaataatcgcatttcctttatctggcagcgaaatagtcgctttctctgtcaccttcccatcactgctgagtgtaaccttgtaaagaattccttcatctgtcgcaaaccacacagatccatttgcctctacaagcggacttctcactttccccgtgatgtcatccttcttgtctttcacctctccggtctttgcatttgcaagtaccagttttccagagtctcctgcaaatagtacattctctccgagaatagctgcttttgtaccgatataatttccttctttttgttctgctgacttccactccggtgcaactgcatcagttcctgtcctagagtctgtcttaaatgcggcaaaatatcctgatactttctgctcctgtgccaccggactaaaacctgcataaatcatatgatcatgatataaaatctggctctgtaccgaaagtccttccgcaggcttctctgtcaaaaatacagagcttagatcagatgtcttcaccgcctgaatccttccgtctgaaagtgggacaaacaacatgccatccccattttcgatgactgccgattcggatgcatccgctgctagttctgtggaagcagtctcctttccggttgtgacatcaattacttttagtacatttccaacagtcacatagaactgattctctatcataagcggaagtgaggtctgtatctctgctgcatcactaatcgtccagtgaatctcggccttctcttttgcattctcagtttcggcagcagatactgccaacggtgcgcagcttaacgccatcgataacgacaaagccgcgcatcctactctgagggtttcccgatatttccgatttggtctcatctagtttctccccttatttctatttctgtctctaaaatatatctgagtctaatcatttctatgttactcatcttttgccctgctgtcaacctctccggagtgatttcccaattatttctatcgcttctttctcactgtcaccatacaaaatctacttctctcccaccagatgacacgccactcgatgccctttctgtacccctctcatttccggtgtcttttctttacaaatctcctccgcatgtggacagcgcccgcagaatgcttttttatagcaatattccatccctctactttcattatagaaaaaagtgatcaatcctaccaactgatcactttgcctttttaccggataaacatcgcatctccaaaactaaagaaacgatatctttctttaattgcttcctcatatgcatttaatacatgctctcttcctgctaatgccgaaacaagcataacaagtgtagattctggcagatggaagtttgtaatcagacaatccagtactttaaactgatatcccggataaataaaaatatccgtccatccactcacgggtgcgatcgttccatcttcttttgccgcagactcaatagtacggcagcttgtagtaccgaccgcaatgactcttttgccatttgcttttgcagtgttgatcttctctgctgcctcttcctcaatctgatagaactcagaatgcatgtggtgttctaaaatattatctactttcaccggacggaatgtccctagacctacatgcaaggtcactctcgcaatctgcactcctttttcctcaatcttctttaacagctccggggtaaaatgaagtcctgctgtcggcgccgctgcagaaccgctgtgttttgcataaaccgtctggtatcggttcttatcttccaactgatgtgtaatgtacggcggaagcggcatctgtccaagccggtcaaggatttcttcaaaaatcccttcatattcaaaatggatcagacgatttccttcttctacaatatccaccacttctccgactaacaatccgtccccaaagctgatccttgttccgatcttagcctttttaccaggttttaccaatgtctcccagacatcgttttcctttctctttaacagcaatacttcaatctttgcatctgttccgattttggaaccgatcagccttgccgggatcactttcgtgtcattgatcacaaggcagtcccccgcctcaagatactctatgatttctcggaacacatgatgttctgtctttcccgtctccttatccagtacaagcaatctggaactggatcgatcctccaacggatcctgcgcgatcaattcctccggtaaatcaaaattaaaatcttcttttctcatcttccgtctccttcacttcttgtcgttcttctatcttctcatccattctgtcgccctgcatctgccggcaaacttctctatcttctttctccacgctctgtctctgctctgattctgcctgcacagctggattctgcataggatgatgtggcatcccatatgatccctgcggtactccgctattgacaactgtcactttcactcgcttctcgtaaattacgcgcgtaccacaaatcatatcatgcaatcccctcttctgtccatcaattcctgccatgatatatccgattccccaaaaaaagctgcacagaaatcttccgatcgtttctcgatagattacattaaaaagtgtaagtttctctcctgtttccgcgactacacggagattcatcagctttttcccaagtgttgtaccggtataatacgtcagcaaaatataatacaacacgccgccaagatacagataaatatccttgatcgtatacgaaaacaacaccctatactccaaaagttccgtcggaaggagcagcgaaagcaaagcaagcggaatccttgcaaacaacaagattcctccaactattaccatatcaatcaagtgcgccgccatccggacaaaaaatcctgcacatacagccggctctccggctttattgtaactgttctgcataatacatcagcaccccgcttccaagatcctcattccattccgtcagcacttccgcctcagattttggtttgagtgtctccagtttagaaaacaaagatgcgagcggagacactccctgctcaggttcataaaatgttgtacatcctgtttcctgttccattgcttcctgcatttcctcatacagactaatctcatcgatcaacccatttgcttttgcctgttttgcggtgtaagttctcccatctgcaatttctctgacagtctcttctgtcatctttcttccatctgcaacaatttccacaaaccgatcaaaagactcatcaacagaactctggtaaatcgcaatctgttcctctgtcagcttactcatatctttattttttccgctagtaatactcacagagcggattcccagtttctcatacagtccactcatatcgtatccggacataatcacaccaatcgaccctgttgtcgtattgggattcgcatagatcttatcggatgatgcagaaatataatacccgccagacgctgcataatgctccatgtaagtccaaaccggacgtccggtttcttctttatatgctactaattttcggtataattcctccgactcatatacggttcctcccggagaatcaactcgaagtaaaatcccctgatttttctcatcctccatcatccggtcaatataatccaatgtggtatcatgctgatagcctgccacagtatcaaatataccgttggaagaagtctgttcctgaatcgtcccttccacagcaacaattccaatatatggttctcccggaagggttgtcgtatttcctcctaacagcgcatcctctgtcttttttgccgtatccgccaacattcgctcagataatgtatttgtcagcacactggaaactcctgtcacaataaaaagtcctgcggcaacaaccgcacctatgatctgtttttgattcatcttctgttcatcctttcttgccttttccatttcctgcaactgctatttcttattctaccacaggaaaaaaagaaagtcatcaaaagttgttcatcaacaaaataaactataatgctgcgtaagagtcacccttttttctccattagcaacgtataccaccaactaaaaatacaccttactaaaaatctctcagcaaggtgtattttccataaatacttttatctattattaattttcttttctatttgctgttttcctgtttctttttgaaacacaaaaacaaatcataatgatgcctcccgatactatcagcagcaaaatcaacccggtaactacaacagggtctcctgtttttaccgactctcccttacttggtttttgagctgtttgcccattcggcttttctccatccggttttggctgttccggttttggctgttctgggtttggtttttccggacttggctgctctgggtttggctgctctgggtttggctgctctgggtttggctgttctgggtttggctgctctggatttggctgctctggatttggctgctctgggtttggctgctctgggttcggctgctctggatctggttgttccggaacagatgccaaaaattcagcagctccaatatcaggctttccatcggcaaggctgtttccaaagaaatctttgtcatatccaaccccattgatttgcgggaagttatttcccaccacataatcaatactatttccatttttcgcctgctcaaaaagatctcttggagacatacctcttccgtcaactaactctgtacctccaaaatgtttccatgcttcatccactgtaattcccttgtcgatcaacacggaagtatcttccaatttatatccatccagcgctccagaggatccggttactgctgttttactctcatttacttccgggccggttccaggtgctgtcagacctgcatcttccgctttcaatgggttatcatccccctcaaacgcctctatcccaccagtatatgcattattatataatttcatatacgttgtcagattttgagtttctcctccatagaacttctgtccttctgggtagtggaacacattattaaatgcaaaggtatcatttaccccttgtccagctcctgtatttgataagaagaagactcccctctctaaaagctgatctgagtaaattgtgttgttataaatcatagttccttttgggcatccctgtgcaaattcaaatgttttatcacggtcattctgactgatattgtagcgcactgtcgctcctgtatgcggatacccacccataataagcataaatccaccttcgttattgtggctgtaattatactgcataaccgagtttgaagatgcatggtcacagtctaatccctgaccatccgttgttccatgtgtctcatatgcttcattatattgcaacactgtattcgctgcttcaaatggccagataccaacattatatcctgtattctgataccgacaatctcttaccaggttatgttcaatcaatgccccatctgtatctctgactgtaattccatctcctccgattttctccatatagttgtctcttacaactacgttagtcgatggataccagtttacagggacacccggatcattcttttcccactggttacaccactgtgaactgatcaacttaattccagatctgtccactctctcaaatgtacatcccgaaattaaaatctgatcatatttgcttggaactcctgttaatgttccattttgtatatttgcttttacatcaaagaaaattccaccattccacttcgatttaatatttccattaatatcatgaatatagcaatcttcaattcgaatatctgaagcagttccaaaatcacggattgacacgttaattgctcttaacgctttttcctgattgttgcttccattcaactcaaaattttgattatacttttgatctaagtttgtaatttctaagcgattaatatggatatactgctgattatataatgaaattacattttcaacttctccgtttccttccagtcttggcagttccccttctccgtaagaactgatttcgattggctgttctgcacttcccattccctgaaatgctaactgttccccacggaatacacttccacattttaataaaatacgatcacccggaacaaacaaattatgttctttaattctccctaatgttctccacgcttctttttccgatgtcccgacagattgatcgtttccaccttcagagtctacataaaatgttttcgcttctctcaccgtatcatcttcaaacacagcattgactctcagtttttcaaactctcccgccggcatcacaaatttattatctacaatcgaaaggctttccattccctccacctgatattctttgaagcgatagcccgctttcggaatcgtctggagtgtaaccgtatcaccttcttttgcttccgcaacatctgaaactgctgttccggcacgatgttccaaatcttcctgcccattgtaaattgttacaacttcaataggtttcttttcgcaaattttctctacgagcagattgtcaaatcccattgacgctccctgtgtcatattccataactgaactttcggtgtcattccaccccagttgttctgttctgtataagctacaagttcttgaccatttgcagaaactctgacctcattttttaccacagtgatttctatatgtgcatattgctccgtcaactgaaacgctgctttttttaattctacattcgttccgtcaatttttctcaacatcaagcttccctgagaattaatcgctactacataacgttgtgtactttgttctccaccacgaaaagcaatctgcattgtacccgaagtttgcgtaactctccttacatccacagaaatccgatagccttcctgtgccgaaacctgactccagtcaatagccggctcatagaaattgcttccttgtccttccgggatatctaccaccaattctccattagaaatgtgaactcctcctggaagcgcagctcctggttctcctccaaaatcatcaaaaaagacttcatctttccctggctctcttgttgtaaaatacgcctttacaactaccgtaggaaatttttcatttagttgaaaacggttgttatcgattgttaccagattatctgtattggtatcataccgttgaaagacatatccatgatttgcttttacagctaatgtcacccactctccggaatgtcctgacaatttatctgcggtcaatgttccgccaatatgttcttcatctaatttcccgtctgtataagtttctagaacaacctgacattctgtcgctgccgcctgttcctctgtttgtaccatctcttcttgtggtactatttcttctgattgaatttcaacctgttcttctgtcacaatctccgacacattttgttgttcttctgccgcaaccgcatactccagcgaacctccagccaaaagcgttgcagtcaaaatcatacacgagattctctttttcatatgtttcatttgctgtctccttaattattttttcataaaattccaaacgttagactctgaaatccttttttgcaattctacttcaaacttatttgcaatgcactgttccaacactgctcctgatacttcctcataggacagataccctccatcctcccggcttgtacaatacagttctttttcttccccctgcgctgtactccagatgacttttcctccttcctccaacaacaaaagcctgttgacaaattcctcgtcgaattccatttttgcacgaatattatttttgtccagtatcacagattctttataaatctctcttccatcctgccgcactgtgtattccgcacaaaccgtatccacttctttgaaattttcctgatgagtcttgtaaaattcatacaactcttttttctcaacacgtttcatcatgtggtcctttaagcttctttcatactctccgagttgccgcttataatattgcattggcgtaaactctaccggaccatataaaggttctcctttctgctttatctctttcctttctttattttcagttttcaaagacttttgaaacgtctcataagaaaactcatcagccagtccttcctttgatgcccagttaaaaatgactcttgaccgtattgccctatctatatcatgattgtgaaaccgtatctcttcctgtgtaatacctttcccatccacaatcaatggatattccattgcgagcagattctttattaaaaaaaatccaaaaaagagtaggagtacaatccctcctatcacaacttgcttttttctatttaatttcttctctcttatcgaaaaccgcttcatgctatcccctatccgttattttttattttttataaataacaaaacgtgttttttcttctattttgtaatttttagctgttttgcgcttattaattatttttattttataatgaaaataggttttttagcaagaacatttgcattgctattttacacaatattttcttttgatttttatgcattttcactatgatttgttatacaatttttacatttttattttatttataataatttttatccctatcaggaaacacacaaaaaaaggcaaaacccattacatttcgcaacagattctgccttctattgaaacactatgaaatttctattgaaaatatttttctaagacactttctcagaataacatccaatttctactgtcttaattcaattcccatttcttctaacgcttttaagattcttgtcattgccgctgtgacatctgcttcttccagtgtcttgtcttttgcacggaatacgatagaatatgcgacagacttaaatcctgctttgatctgcgcaccttcgtagaggtcaaataacttgtagctctctaagtaagcgccaccttttttctcgatcacatcttccacctgaccaactaagatttcttttggcattaccatgctaatgtctcttgtcactgccgggtattttgcgattccttcgtatttacggtcaaaagtagcaagctctaccacttccggcatatcaatgactgccacatatgctcttgttccgattccataagtatctgcaacatccggatgtacttctcctaagtatccaacaacttttccatcgtaaatgatgtttgcctgacgtcctggatgtaagaacggttttcctgcatgcggatcatatgtttctttcttgtgcataccgatcttttcaaagaattcttccacaacacctttcatactaaagaaatcaccttctccgtacataccaagcgtaaactgcatacgctcttccggaagctctgtaaccggaacttgtttcggaagataaatatttccaagctcatagagacggacatctttatttcttcggttatagtttgttgcgagagaagttaacattccatttaaggatgtagttctcataatgctgtaatcttctccgagcggattcataatctctacgacttcacgcagtttcgaatctgccggaatcaataatttatcaaatactttcggactctcgaaggaatatgtcattccctggctgaatccacagaactctgcaatgtttcttgcaacttcctcgatacgtaacttgaaggacagttttcctgttgtcgcctctcctttcggaagtgtagttgggatattatcatatccatagaatcttgctacttcttctgcaagatccgcaaggcggaacaaatcatgacggaaggtcggtgcaatcacttcctttgtatcctcatcgtattccagaccgatttttgcaaaatagcccaacatttcttcctcagaaatgtctgttccaagcatcacattgattttctctgcatcaaacggaacccgaactggttcttttacttttccgtatacatccacagttcctccgacaacttctcctgctcctaattcctcgatcagctgacatgcacggtcgattgcagcttttgcattgttcggatctaatcccttttcaaattttccggacgcatctgtacgaagccccacttttttgctagatttacggatatttgttccatcaaaacatgctgcctcgaataacatagtctgcacatcatctgtgatcatcgtattttctccgcccatgattccggcgattccaacagatttctctccatcacagatcatcagaacagattcatccaactctctctcctgcccatccaatgtcacaaacttttctcctgacttggcagtcttcacaacaatttcttttcctgcgattttttccagatcataagcatgcattggctgtccgtactcttccatcacatagtttgtgatatcaactaagttgttgatcgggcggattccaactgatgccaatcttctctgcatccatttcggagatggtcccactttgacattttttacaactcttgcgcagtaacgcgggcagagatctgcatcttccacagttactttaatataatcattgacatcctcactgtttccagtctctgtcacaaccggtggatgaaattcttttccaaaggtagctgctgcttctcttgcaattccaaccacactgaagcagtccacacggtttgatgtcacttcatattcaaatacgacatcatttcttccaagtgcctcgattgcactgcttcctacaacagcatcctcctcaaaaatgtagattccattttctgctgcttccggatacatgtcctttgtagatccaagttcctcgatagaacacatcataccgaagctgtctaccccacgcaattttccttttttgatcttgattccacctgcaacctgctttccgtcatggcttcccgccacacgtccgccgtccaatacaaccggaatttttgctccttcaaatacattttttgctcccgttacaatctgtacggtttctgatccgacatttacctggcatacaacaagtttatctgcatccgggtgtttctcgatcttctcaatctgcccaatcacgattttttccaaatctgcatcaagcatttcatatccttctacctttgttccggaaagtgtcatcgcatccgtatattcctgcgctgtgacatccagatctggtacatatgcttttatccatgataatgatgtattcatgtttctattcctttctcacttcgatatttctgtctttctcacttttccattttcctgaaaactgactttccggagaattgtgtcttcctctctgcacatgcttctccgcctttttctgatgagttccaatctgttttagaactgttttaagaaacggatgtcattttcatagagcaaacgcatgtcgtcaatctcatattttaacagcgcgatacgctccagaccgacaccgaatgcaaatccattgtactcttccggatcaattccgcacatttccagtacatgtggatgaaccataccacatcctaagatttcaatccaaccggatcctttacagaaacgacatccctttccgccacatttgaagcatgtcacatccacctcagcgctcggctctgtgaacgggaagtgatgcggtctgaattttgtctttgtctctggtccgaataattctttcgcaaatacttccagtgttccttttaagtctgcaaaagaaatatttttgtcgatcacaagtccttcaatctggtggaaagacggagagtgtgtcgcatccacttcatctgaacggaatacacgtcccggagcgatcatacggatcggaagttctcccttttccatcacacgcgcctgtaccggggaagtctgtgtacgaagtacgatatctttattgatatagaaagtatcctgctcatcttttgccggatgatctgccggaatattcaacttctcaaagttgtattcatcgtattctacttccggtccttccacaacctcatatcccattccaataaagatgcgttccacttcttctaatgcgatcgtattcggatgacggtgtccgaccatatttttcttcgatggcagtgtcacgtcaatgacttcagattttaactgttcctcacgaagtgctctttccatctttgtctttgtctcttctaataactgttcaattgcctctctcgtctcattgacaagctgtccaaccttcggtctgtcttccggggcaacatctttcatcccttttaaaactgctgtcagctctccctttttcccaagaaatctgatttttacatcattcagtttttccggtgcatcagcagcctggatcagtctgactgcttcttcttggatgctctgtaatttttccttcatcttttctgattcctcctaaataaaaaaatccccgtcccaaaaagggacgaggtctatcgcggtaccaccctaattcctgctcataaaagtcaggctctcggactgcgtaacgtgcagatacgtcatcttctactaagttccgggcatcaatcacctagaatcctttccaaaatgcagctcccgtgggaaattcgatccctatctgaactaaaggaaacttccagccgatgattccctctctctgttagaaaatagttctctactgacacgttcaacgcctttgatttatcaataactcatttgattgtctgaatcacttattattttatcataggtttttgtgatgtcaagtggtatttcagaaaacaaaatctcagaatgcacgatacctgccgatttacagccaaagccgctttccatctaaagctacatattgtaatacatcatccgtatcgtagactagttttaacgaaaagaacggacgatttttttccagaagccgtaggaaaatcttatcaccttcccacaaattcaagtcataaatcgcttctttttctacccattccagctccccttcatcacaggaaatctgtgtcccctcaaaaccgtctgccgtgaaaagagacatatattcgatcgtgtcttctccgtatacaaaagttacaattccccggtactgccatgaagtcagtgtgtacccggtttcttctttgacttctcttaaaaggcactcttccggactttcatttttctcaaaatgcccgccaacaccgatccacttatcccgattgacatcattttcctttactgtacgatgtaacatcagatattttccgtctttttctatgtaacacaatgtgcttaattctttcatttgcagtccccttttcaatccactaatatacactttgcaatacgtgcctgcaaccttctttataatgctgccaaaagaaagagtcctatcagaaatactccgatccccacaaggaaaaacattgttcccagtgcacagttaatgtaaattccactgccactgatataagatctctgtggtttcttctgattatagtgaactgtatagtccctatttcgacggaacactccgaaggttgtccatcctgtcctgccctcataccgcactccatccaccatatactcatatgtggcagtgatccccttctgatctgttcccagagcgcttctcgactccaaaatccttccgatcgtacagctcctacatgtaaataacttatagtattttgggaaactgtacaaagccccgacaagcgtaaatgtaaccgcaacaatccataccgaaatcatatgtattccccactattatcttaatcttctggttctaatctcttttcacaaactatgatataacaaagcctgtcactacaacaccctttcaagttcacgcaataactttgatttcatttcttccaactctgtctctgaaggaatattttcttcactgtacatcaattccataggataccaccatacaggacctcttccatgatttccataattttctatatcaccggttactcttggaaacaaatgccagtgaagatgcgtatctccattccccagcaattcataattcattttttctgcaccaaacgcctttgctactgcctctgccacaatagacatttcctccagatatttcattttggtatcatgatctaatgtaaacaactctgtctgatgttctttgcataaaaataatgtatagcccttaaaatgttgattatccccaagcacaacatatcccgtttccagttcttttacaaaatatggatttgtcccttcttttatcctctgaattctttcacaaataaagcacatatatgtatccctcccaaatcattcttctccaaaatagtttaacaaatgtatcggctttttcccactgtatctgccatcttcctacatagatgtgaaaaaatcttctgccagcatctcgtttacttctccgccaagcagcataatatacatacatgcatacagccagagcatgatcagcatgattgtcgtcatacttccatacatcgtagaaaatccggtaaaaatattgacatatgctgaaaagatataagaagctgccgcccatccgatcgcagtcagaaatgctcccggaaactgtctgataaattttgttttcttatttggaagaaaatgatagattgtcatagaaaacaccgtcaatactacaatcgatgccactgcacggatattgatgatcagatctatgattcccttcataaaaggatagtgattgacaataaaaatgctcaaccgatcaccaaaaccaagtataacaagggaaagtacgatcgcaataataaatagtactgtgtaaaatgctgcacgcaggcgcaggtaaatataatttctcgtttccttacttccatagacactgttaagccccgcactcattgcaagaactcctctgcctgcagaccagattgctacaagcccagtcagagagatcatcgcctgagactgattgtacacctgattgacaatagaaacaatcatcgggtagatggtcttcggaagtacatgcgtcaccgcacgtatgacgtctgctttcgtcactggcgtatactgtaccagagcaagaagcagcatgataaaaggaatcattgacagcactataaaaaaggctgactgtgcagcatatgcacctgtatgattctctgaaatcctatccataatccggttcaataaccggtattttttcattatcgtttctttcatcggacttctccttattttttctaacacacaatcttaccatgcttttctctcaaaatgcaatctgttttttatacagtctgcatacagtctgcatttttatatggcactgtgatatggtatcctgaataccggccggtttgcttttcgtaaatttcaccgtacttctacatcgtgataaaatgttgtcagaatctcgagataattctttccttttttcgccatctcgtttgcaccattctggctcattccgatgccatgtccgaacccaccgccgtccagtacataattgccgtcctgatactccacagtaaaaaatgcactcggaagcagtgccatactatctatcactgtcccatcctgcttctcaatcgtatacccatttccgccaagcgccgtccgtatcttattttccgtatcaacagtcacacttcccaactccccagtcaccacaatctgctgtgccacaccaccgggaccgtattttgtcacttccatcgaagttacatttccgatattggtctgtgtatttagattgatcatacttgtcagtacatttgtcggaatgaccgcccgccatcgataccatggaaggtctgcttcgtaatcgcgctctgcatctttgatctctgcactctgtagataccctttctccggcgaagcatttccccacgcctccgccgttgtcgtctttccgcaggatgtagaaaaataataagccgtgatcacctgatcttgataccataatttttgtcctcttgtctcatccaccgctcggtttgtgctcgcctgctctccagaattgccatatacctggaaggcagtgctgtcatcaatatgtgcctgatattccggatatccaaacccctgcgtctgcttatatgcgtagctgcgcgcacagaccgcctgcactttcaacgcttccggctcataggatgcaggcatttctgacggcacaaccccatataagtactgttccattgagagttcattgacgatcacaaccccttccgctgtctgaaacaattcgattttcccacgataatttggaacaccgcatcctcggttcaatgtgacaaccgcgatcaaatctccttcttctttcggctcaatatgtatcgttcccttcgcaaacattgcatcatccggacagattgtgaccacttctcctggagcgctctctcgtacttcatctccactttggattttcagaccgcctgctgcctgaaatcccgcttcgggatgtgccacatttgcaaatccatctgtctttaataccacacggacaacggaatcttccacttctttttcggttccttttcccttacttttcttttcttcctctgtcacgtttgaatttctgtcctttttcacctctttctgctgattgttagaaatacttttcatcagacaggcaaaaacagataaccccaacagaagtgccaacatatgatatttatatttttctatccatttcatctttgttttcactctttctcatacaaaaatggcagccgctttcacgactgcctttctcttttgtaagctttccccggaggtgccgttttctgtcttttgactcctagcattccgctaggtgggcaaccgcatctgcttttctgtcttccactgcttcgatcggtggcctgacatattacagagatataagaatcccgtttaaagtattgtaggttcaaaataacagaattgtcgaacatcccaggtatttctcttttgttctaggtacattatacatgatgtctttcaagatttcaactgcttcttacttagatttttttcagttttcattttgtttttacaaaaagtatcttttacaaaaaacattttgtaaaataaaacaaacgggagtttgacacatcatttttataactttccttagaaaccccttatttaagccattcaaggcttattttttcgtcaaattttatgattttatacgtgctatttcgtgctatctatagtataataaagaaaaaggggtggaggaattatcatatgtatgtttctattacaggaaataaaggaaatcaagatgtttatatcaaacaatcttatcgaaaagataacggaaaaacatcctctcgtatttataaaaaacttggaaaatataatactctcttagaacagttttcaggcaatgaaaaagagctaatggactgggcaaagaaagaagccgaaaaagaaactcttgcttacaatcagcaaaaagaaaaagtctccctttctttgtctcctcttgctcgcattccacttgacgaagaacgcgtatttaatatcggatatttatttttacagaagatatgcagcgagctaagaatggataacatttgcagaaatatacgtaatcatcataagttttcgtatgatttccaagcaattctcacagatttgatttatacaagaatactggctccttctagtaaactcagcagttataagtactgtcattctttattagaaccgccaaaatattcactccaggatctttatcgtgccttatccgttctcgctgaggaatccgactttattcaggaagaattatacaagaattccaactttattcatccacggaattctaagattttatattacgattgcacaaactattatttcgagattgaagctgaagatggcatcaaaaaatatggaaaaagtaaagaacatcgtcccaacccaatcgtaactatgggactttttatggatgcggatggtattcctttggcatttgatatatttccaggaaaccaaaacgaacaactcacattaaaaccaattgaaaagaaggtgatcaaagattttaattgcagtgaattcattttttgttcagatgctggtttaggtggaaaaagcaatcgttttctgaacagttttggtaatcgttcttatgtgattacttattctttgaaaaaaatgaaaaaggaagaacgtgagttagcactcttgccaactcagtttaaggttcctggttccaacaaactgattgacttgcggacacttgatgaatccgatccaaaggtatacaacactatttattataaagaatacccgcttgtaacaggagatatggatgaaacggtcattatcacctattcgccaaaatataaagcttatcaaagtaagattcgtaatgctcagattgatcgagcgaaaaaaatgatacaatcttcagataaaacccgaaaaggaaaaggttcaaatgatccagctcgtttcattcaaagaacctcagtcacagaagatggtgaaatagctcaaaaaaatatttatcaattagatgaagctaaaatcctagaagagtctatgtatgatggattttatgcagtggttacaaatcttgagggagatatcagagagattattaatatcaacaaacaacgctgggaaatcgaagaaaactttagaatcatgaaatcagaattcgaagcgagacctgtatttgttagacgcgaagatcgcatcaaagctcatttcctgacctgcttcattagcctattagtttatcgattattggaaaagaaacttggagaagagtttacctgcagtcagattttagaaacattaagaaatatgaatgttacacttttatccaaagacagtggctacattccttcttacaaacgtacaaagataacagacaaactacatagttcctttgggttccgtacggattatgaattcatacgcaaatctactatgaggacgatcataaaagaaacaaaacagaacaactagaaaaatagcacatatcgttgcaaacaagaaaacggctacaccacccatgtttacggggcttgtagccgcatttttatttttcaactgtcaaagatgggattatacatgatgtctttcaagatttcaactgcttcttacttagatttttttcagttttcattttgtttttacaaaaagtatcttttacaaaaaacattttgtaaaataaaacaaaatcttttcccggaaagtcaatttttccgaaatcagtctgcacacgttccgatatgttctgcagagctctctttcttctttatcagaaatggtgcccccgctataccacgctttaagcgctgtctgctgtgccacttttatctgcacttccattttatcacagacttttttcgcctcctgcccgaattcatccccgaggcagtcattctctgccatcccggcaaaccgtagtacttcatagagactgaaaaagatcttctgtgctttctcatttctgttctttgcaaatatcccctggcgctgctgcaccttgtaaaagcgccatgcgccaaaacttatgatactcatcagtataaacaacagaagctgttttattcgttttatcaacaaattactcttcgttccattgtcttctttttctacatccacatttgttgcagcatttttttctgtaccttgctgctgattttccacatttttatcattcgcttcttttgtcccggtctcatgttcttttggaatattggattctgccatctggctgtcagaactgactctctgcgaatcctcaccagatacttccggggaaacatttgccaaatctgtcccgtgcgcttttgatgtatcgtctcttccgtaagttggtgtcagttccactgggatccagattccgtcacccgtgtaaatttctgtccatgcatgggcatctgccccggttacagtcacctgataagttccatcatcggaagttttccactgctccttaccaatcaggtatccggaaacaaatcgcgccggaatatcatgactgcggaagagcaatgttgccgccgtcgcataatgcacacaatatccttttttgttctcaaacagaaagtattctacatattcttttccccacggaacctttcccggtgacagactataacttgtatgcgcgcccagccattgctccatcgctgctgaaatttcaaagagagtttcaccctccagtgggatctgctgcagttttttcttttgttctgcatcgatcttaagatactgtttgctgacaaacaaatcatactctgacgtttttctaagaatctcctcacacttttttccggtgcgttcctgccagtcagcctctgatagttcgcaaaaagaagtcgtatacgtcgttttcccggttcctttcacataggtatctccccatacttcctgctcatttctgatcttgcttccatatggaagatattcatatgccttctctgtatcctcatactccacagatagttttttttcatccttctttttcttcagccagcgatagacatccccttttctctcttccagtgcctctcgccttccaagctgatctctcgcactgctctccattctttcccactgttttctattgtaatctgctccaatatatccatacaaatacagatccgtctgtggtttttccccgactgtcactttcagctggggctcttttcccggttccagccgatccgccacagataagtctccatttccaatacctcctgctgcaatatctgtcctcacattctctctggtacttcttcggatatcctgccacagttcttctaatacgagtttttgttttggactgtccggcggaaaaattgtttgtaacaacggttccagaatacacgcacctcccacaaatgcaagcgctgcgattccgatcagcattccgtttgccgttccgaaaaattttatcttcctttgttttcccggcagcgcagtctgcattgccagaagtcccatgattcctatcagcaactcccacaccgtacgattttccggaactttcccaaccaggaatggcgcgagaaaaccaaatgcaaacaacactgccaaaagtattctgcccttcttttgtaaaaatcctccaacaagaagaccactcacaaagactcccgccacaaggattgccgtctgctcggtagaaattccccctgtcttcacatactgcacagtatcccatgagaactgataatacgcattgatcgcttccgtcattcgctccatactgcgacaaatcccctcacagatttccttccatctccaaagtccgatccatacaaacagtcccactgccgctggaaacagatattttctgtgccgtttccagccaaacgcaatgccccagatcacagaggagagtacaatccagatgaaaatcattttttgatcatatggaatctgaaacgcatctgcgattccatgcaacatgccaagcgtccctactgctccatagaacacactccacgctgtttccatcttgcacccctccctcatacttccaacacacactgtcttagccactcctgactttctatcagatgacctgcaaaaatctgttcctcatttttgaaaaaaccgccttctcctcgccaggaaagtatcgtatgatacaactcctgtggataaatgctcctgtaactttctgtaaggctctcttgtgacgattttcctgctccccatgtttcaagaaatcggattgcaaacaaataaacatcttcttctgtaaaaatcctcgcccgctctagttccccattctccatgatccagctcactacatggctgcatcccgcatccaaaagacttcttacaagtgataccgctgtctgcagatacctgctgatctctgcggcgctttgtcccccttctttccacacaggttccaataaaagcagcaccgctgttccaacaggtcttccaaattctttcacataccattctcccttccttgcactaagtttccaatggatgcgtgccatccggtcacccggctgatagtcccgcaatgcaaaaagttccgatggatcatcgccgctcacctcttctgaaaatcgctcaccttccagagaaaaattacttgtttgaacagttacctccgtcacaatcggatatgtctttggaaaaatcaatatttctgctttctttttcattcgtttccgaaatgaccagattcccaacacatcatatacacggcagtctactaactctgcacatactttgcccgaatatttctgcaaatgtttgacagcaatctgtttcttttcttttgcacgcactgcaacccacagtctttctttcctcttcttttcctctcccgcatactgataactcagatctatccgcagcttacatactggaatacacagacgatttctgacaaatatctgactttgtagtgcttccccctcctccacaaacattttcgtatgcttccactctgccgacacaccactccacgagattcctgcattacaaagcaaaagaagcagaaacattccttcaaatgccagaacaaaattcccaagttcccaacggtacagcatattcaaatataccgtcactgccagtattcccgcatagactatttttcctctcatctgccgtatctcctttccacgcactgcctttggtcttttatcctcgattcggcagcggagccgaaacctgacggagaatttcccaaagcacctcttccttgtccactctctgcgctctcgcttttgcattcagagagatcctatgcgccgtcaccgccaaaaacacatcttgcacatctttcggagtacagtattcccgcccatgtaaaaatgcggtcgctttcgccatcttcgcaagagcgatcgttcctctggggctgacaccatatgcaatcataggatgttccctcgtcatctgtatcagacttccgatatactgatagacacggtcatggacgtaaatttcctccacatattcctgcatctgctgaagcattgatgcagagatcacggaatgcaccaaccgttccgattgccgtttctgattcccttttacaatttcaatctcatggcgaatatccgggtatcccatcgtcatacagatcataaagcgatccaactgtgactccggcaacatctgtgtgccggtggaacccatcgggttctccgtcgcaatgacaaaaaatggcttcggaacttcccgtgtaacctgatctactgtgactgtcccttcctccatcacttcaagaagcgccgactgtgtcttcggcgatgttcgattcagttcatctgcaagaaataagttacacatcaccgctcccgcctgataaacaaactggtccctctccttctggtacattgaaaatccgacaagatctgatggaaggatatctggtgtaaactgtacccgcttccagtccagccccatactttttgcaagcgcaagtgccaatgtcgtctttcctactcccggaatatcttcaatcagaatatgtccccctgcaagaatcgcagcaagcgccttccagatacactcatcctttccgatcactactctttttacttcttttattatatcctgtgccagttccatatactgcatacgaccatccccctgacctttctttttagtatagcattcccccactatttctgcatcttttatcttttctgcaccttaaaatttaacttcttctttacaaacagtgtgtaacacttgacaacagtttgtatctgttatatactgtttgcaaagaaaggggtacaaaatgagaattattataaatcattcttcaatgacacctatctatgagcaaattgtagaacaagtgaaaacattgattcgaaatgaaaaactaaaagaaaatgataatcttccatctgtccgttcacttgcaaaagaattgaaaataagtgctttgactgtaaaaaaagcatacgacaacttagaaagtgaaggatttacagtgaccgtccacggaaaaggaacatacgttgccgcaacaaatccggaacttttactggaagaacaaaaaaaagaattagaggctgacttagagcaggccattcaaaaaggcaggcgttacggcatccgcgatgaagatatcaaaagcttatttgaactgattttggagggataactatgttaaaaattgaacacttaaaaaaaagctatgaaaacttttcactagactgctctctggaaataaagcgaggtcacgtcactgggctgatcggtcaaaatggtgccggaaaaagcactacctttaaagccattttagggctgatttcttatgaacatggtgatatcacaatcctcggaaaaccacttgctcagtttacagcaaaagataagcaagatttgggagtagtcctttctgattctggtttcagcggatatttgaccatcaacgacatcctccctatcatggaaaacttatataaaaattttgacaaatcattcttcttggaacaagtagaaaaatttcaacttccatgcgacaaaaagatcaaggatttttcaacaggcatgaaagcgaaagtaaaagttttaaccgcgatctcacaccatgcaaaactgttaattctcgatgagccaacggcaggactggatgtgatagccagagatgaattgctggaactcttaagagattttatggcaaaagaggaaggaaactctattttaatcagttctcatatttccagcgatctggagtcaatctgcgatgatctctatatgatacatcaggggacgatcatcctgcatgaggacaccgatgtattgttaagcgattatgcactgcttaaagttgatgacgaagcatatgccggactggataaacaatatctgctgcgctccaaaaaggaaagttacggatatagctgcctgaccaatcaaaagcagtattacgccgaaaactatccgcaaatcgcaattgaaaaaggaactatagacgaagtaatcacaatgatgatcagaggtgctgcataatgaaaggattattaatcaaagattttaaattaatgaaaggacagaaaaatttctttttggctatcgtcgccattgctttggcaatgatcacactatcgccgggaacttcgtttgcaatcggcttcttaggttttgtcggttcactattttcattgagttctatcagctacgacgaatttgacaacggaaatgcttttctgttctctctgccaatcacacgcaaagagtatgtgttagaaaaatatacttttggagtcctttgtggaatcgcttctttatttttaggaacactcatcagctttttttccatcctcattacagacaaaggcaatctccgggaaatgtttctgaccgcatgtactctgcttcctgtcatccttttgcttctgtcaatcatgcttcctttcgttttaaaatttggcggtgaaaaaggaagaatcgctatcttaggtatgatgggatttctatttgtggcaggaatcctttttacaaaaatagctgaatatatgaaaatagatttctatccacttgcaaaaagactttcacaaatcgatccgcatgtttatattttattctttttgtttcttgcaatcactgctttggctgtctcatgccttgtcagccaatctatcttgaacaaaaaagaattttaaaagtgaggtgtgtttatggatctgactattctggcaattggattgcttttaggtatcggcattcctctcagaaacagagcaatcaaaaaacatcgtaagaataagaaaaatactgacaaaaatcacctttaacattcatgcaaaagccgtgagcagtccctcatactatgagctcttctcacgactttcttacattcgcttttcttcttcaaattttttatctccacttgtcaatgtagcgatcctttcaccagccatttctaaatttattataaaattcgtgacgttcctgtatggaaatggtattatatttttatataattttgtccgtgaccggacacaatggaggaatgaaaatatgtttacaaaaaaagaactttactgtgccaactgcggcagaaaaattgatttaaaattcggtcttccggactcctgtacaaactgcaagatccgatttgaatttccaaagatcacacaaaaacatgggatcaccggattccttcttctgtttgccctctctctggctccgatctgggcattgatcgaactaatccgcccgatgatgaatgcatctcgtgcaatcaacatcggagtaacgatccttgcactcttcggagggattgtctggttcaagacagttctgacacttctgaatcagtacggcttttatgtctgccgaaatattgatcgacgctagcaggcttgcagctactgcaaacattatatttctgaaattcccaagcatccccgcatcgccggggcaaagtgcaaactggcagacattctgaaattctccccacttttatgccgattatgaactccaagtctctatccgcggtggctggagcgtcatgcagtatccgtttcttacactgaaagcaataaacagataaatgtaaatggttcatactatttttttctatctgatcgacactccctatagctaaagcaagcagttttacgacacattagataaccgagaaaggaaggtaactatgaagcctcttataattgattccgaaatcactttaattccttactatccaaactatgatactgcgcttccatggtatcaagatctggatgtatgcaggcaggttgacaacattgattgtacctattcccttgaacggctgcaaaaaatgtattcatttctcagcactcacggagactgcttctatatccagtatcagggagtgcttgtcggcaatgtcactctccgcaatgatcaggaagtatgcattgttgtatgcaaagactttcaaaataagcggattggaagacgctgtatcctaaaaatgattgagcttgcaaaagaaaaaagaatggatcagattaccgcagagatctatccttttaacactcagagtcagaaaatgtttctgtctatcggttttataaaaactggagaagagacttatacataccagctttcataataactttaaggagctgatcaatttatgaatattgaattactgccatttttcaagcagaagcgattgtacgagaatactctgaatccctctatataaaatcatgcacttaggaggccatcatgcaacaatataaaattacctttggcgtagaattaaatgaggaaaagttatatgccatcgaacgtgactttggcattccggcacattttgataccatctatatcgaagcaaattctccaagacatgccatccggcttttttgcgaaaagtatggtatttcccgacgcatcattcggacatccgacttgttaaaaatagtatacgtcgtaaggccaggagggaaacacggatttttaggatttcgtgtttccggtttagaatggaagaaagattttgaaacactgcagaagaagtccttctttcactaatcatagatacccacagtatattcttttctactggaattttgtccagactgtacacatgtttctcatttattcaggaggtactatttttattatgaagctatcaaaaaaaatcccggaatacattcctgctgactcctatctggaggtgtctaacagtttgttccgggatatttatactctattttgcggaaggcagcaatgtccttctctctattctttcggccccgcggtgagggaatgctatctgctccacttctgtctcgacggctgcggagatttctatgcaaatgatcaacactaccatcttgaaaaaggacagggctttctgatctgcccaaatgagctgacgttctatcaggcggatgaagcgcatccgtggacctacgcatggattggactttctggagagcaggtatctcactatcttgaccttgcaggaatttcttcccgaaccccggtctttcgctgtcctgatgtagatctgatccgatctgatatcgatgatatgatcgcacaccatacactaagttattcttgtgaagtccatattcaaggggtcttaatgaagattttatcctatctgattgaagtatcttcgcatccaagacaaaaagaagaaaatggcaacagcctctatgtaagccgcgccatttcctacattcataaaaactatcagaatccggtgtctgttcaggaaattgcagattatctttccctgaaccgcagctatctgacagagctgtttgtacgcacactacatttgtcccctcagcaatttctgatgaaataccggattacaaaggcggttgattttcttacctacaccgacttgagtgtagaacacattgcctgctcctgcggttacgcaaatatatcttctttctcaaaggcattcaaaaaagtgaccgggatcagcccttcgcagtatcgaaatgagcatcagacttacacttcctgaaggaaatataaccgagactgataatctccatttcttccgttatatttttctccattctgccctgcagctgcatcagagacaacaagccctgcctgcatcagttcatccccgaaaagaatttctttccggtcactgatctgataggcagctccttcctttagtcctgccagatgcaatcgctcaaatcctgcattcacaggttccagcacacgataataaccaaccagtgcctggctctgatcttcggatacaaccatccatgctgtcacatttccctcaaacgggcttttcagacgataaaacgttcccttctgaatcaattctctatgcgccttcatgaacacaatctgctctttgatttcctccaactccgctttctccatcgaagtaacgtcaagttcataaccaaatgtaccaaaataagctacatttgcccgtgtgtttaacggagtattcctcaatacctgatgatttggcacagcagatacatgggatcccatactgcttaccggatagacaaatgatgtgccatattgaatcttcagacgttctacagcatctgtgtcatccgaagtccagcattgtggcgcataatatagaagtcccggatcaaatcttgcacctccgctggcgcaggactcaaatagaatctccggaaactgctccgtcaatttttcatataaatgatatactccgagaatatatttatggaaaacagatccctgcttttctgcctcggaaccatgtgaatagatttccgaaatgctcctgttcatatcccatttcacataagaaatcggagcttctttcaaaagtttctccatctgaccgtaaattccgtctactacttcttctctggagaaatcaagcacaagctgatgccttccgacagaaacattccttcccggtgtcgataagatccaatccggatgttcctcatacaacctgctttttttgtttgtcatctccggttcaaaccacaggccaaactttaatcccatcgcctcaatcttcttggcaagtccagcaatccctcccgggagcttctgcagattcggataccagtcgcccagagaggtgaaatcgtcattacgctctccaaaccatccatcatcgagcacaaacagttcaattcccagttcttttgcttttccggcaatctttaaaatcttctcctcattgaagtcaaaatacgttccttcccagttattgatcagaatcggtcttacctcgtctctgtattttccccgcaccagtcttgtccggtacaacttatgaaaaatctggctcattccattgagacccgcatcagaatagaccatcactgcctcaggtgtctggaacgtttctcctttgtttaattcccaagaaaaacgatccggatggattcccattgtaattcttgtcacatcataagtatccacctctgcctgtgcgagaaaatttccgctgtatacaaggctaaatccaatcgcttccccgaaagtttccgttgtctccgggcgctttaatgcaaggaacggattataattgctgctgctagatcctctcatgctgtacaccgcctgaatcccatgctccagcttccttgttttgactgcgcgctctcttccccatgctccggtcagttcgatcatctcatattgcttatccggcagatccagactcaggctcatcgcacggtcaagaagaatactctcctcccctttgtgatgaaatcttgcatttcttgcaatagccggaaattcttcatagattgtatacgtcaagatcaattctgtctgaatcagtgaatcttccagtgtcacctcaagtgtcactgcttctttctcttcttccacataagtggccggaagaccttctaaccttggctttccactgtaaagtcgatgacttttataaacaaattctgtcactctgcttccgtttttttgcaaaatctcctgggccggatatctcatatctccgctgccataagccggatactcttgacggatatgttccatcgaaaaagtactgtcatcttcaaatgtacatacagacattggtctgtcacaaaattccaaaagatgattaaaactctccctgtctctgagccgcttcccaaaatataactgtccaagctgtccgttttttaaaatcgtaaaaatatagctgattttttcgttgaacagatgaaaatttctactttcctcatgataaattactggcatctgatctcctccttctcaagtcatccaaccgcctctctgatggactgcaccacccatctctgttcggtcttatcgctgcatctactgatttctattatatcggaatctgtccccagttcaatttgcagatgtcggtattatttgtccaaatgttggatttcaaaattttatctaaaatccataaaaaatgtgttcttcttttccattctccgccgctttcttcgcagcaagacaagcagctgcacttgcaagccctgcacataaatcggacctgctctccttcccttccagaacatctacataagcttttgcaagctgctcatctcccccaaaatgtaccaagccttctggatatgtaaacctatgttctgcactgtgttttgcatcataatagtctactcgaagtgtcgctgtataaaagtcaaattctgcacttgctttcgaccctataaagcgcgctccccgtcgtccagcattatttttgacaaaaaatgtctggtgataagaaataatcgttccatcttcacaagtgaaaatcgccgctcctacatcctcatttccagtatcttttgcaaaacagcaatatttcccggtaggttcctctttccgctctgttttcacaacaaagctactttccggacaggtatgatattcgctgcaatcctcacagcaaagccctgcctctttttctcctttgaaatacatttttgcagtctttgccacaacactcaccggacgtttccccaaaatgtaagtaatataatccatgtcatgtgttgatttctgtaaaaacagtcctcccgtcagggaatcatcccgataccagctatgatagtaaacactgccatacggcacatgattcgttgcttgtacggacagaacttctcccagttctccactatccactaattttttcatttcttttacaatacaagtaaacctaagcggaaaggatacaactgtctgttcgcgcatcccttccgatgcatgtagcaggcgctggtactgttcttcattaatgcaaactggtttttctaaaaacaatggtatctttttctgaaataccaactccgcatatttcgtatgttgattgcagcgtgttccgatcagcacaccatctaacctttctttttccaacatctcttccgctgtttcataaaaaacagtctgtgcaaattctgctgtctgtgcaaatgcttcctgcttctggcaccaaagtggatctgcaactgcagcaacctgaactggtgcttggattccttgaaatgcttccatcatcgtttcacttcgcaaaccatatcctataatccctaatttcttcaatcttatttccttcttccttaaaatttcttttctattttttctgttgatacttattatcaccggaaccacactctccgtcaataaaaaatcctgatgcattgacaaaaatgttacctttcacttctctttccaaaaataggcaaaaataccctgacctcctctcttttctaaggtatggccagagtatcttcatgaaatcatttattcttttttcgaacagtcaactggcaatatctaaatttctgctaccagttttttcagtgcttccaatgcttcctccggaagtttgtcgtatccgtctttgtttacggcaaatccttctactgcattgacacgattctgcattgcattctttaactgtgccttgtactcttcgtcattcagatccggaacaaatccttcccattccatgatctcaatgtcttcaaaagctccccactgtttgaattctgcttttccttctacaattgcttctaagattccaagtgtatcttttggctgtactttcttgcccatgaagtcacctgtattgacgatatagcagtctacattcttttcttccactaattttttgaacttctcataatcatttatcagtggatatgttctaaatgggtttgcatatggaacgatacggagtgcatttaagtctgttcctgctgcaacacgctctgctgtggatgtctttgttgcaagtgtcgctcccattacggatgcaagtgcagctccttttaattttactaccggcggaatagtaggatctttcatgatccagaagattgcatttaccggagcatcgatcttatatacacggttcggtgaccataattttgacttgattgcacgtccgttaccatttctgatatcttctgtcactaactggatatgtccttcttcgtccatagtagcagaacagttctgagcagataataaatactgattatccgggcatccagttgggtaatctgccgtcttatcaaaataagtcggttctaatgctaccgaagaacatgtgtctgtattgataataaatgcatcatcatgtaatactgtaatcggatattttccaccatgttttgcatgtgtcagtgtagatttacctgatccagaaagtccgaatacggatgctacgaacttagaaccatccgcaagtgtgtattctttctgtccaccatggcaggaagcatatccgtttctatttgcgattgcccatgccattgtcaatgttccttttttatgctctccgaaatatctcatacctaaaatacatgcgcagttctctgcagtatcaaaatagcataaagtcagcggatcactcagacagctgaaatctacgtccggtctttcctgtggaatccactgtggatctgagaaaatataaatatccggttcttttccctctccgactggttttgatttcttatacattttcacatattcatctgacatgtactggaagttgagcatccagttgtacatgatattctcttcgccttccggaatcagaagatgtgcttttaccatgaattctgggtcaagacctacgaatacttctgcgtggtacattgttttccaacgtgattcatagatagcatccatcgctactttgtcaagctttgcagaatctactcccggctctcctttgatccggcgagctgctgcgtaacgtcctgttactgctccgtcattgaataaaagaacttttgcatctttctcaagaccaaattcttctcctctatatacaggcatatctgtcacgattgttcctggtgaattttttgctaactcataagcttcttttaaagtatttactttcactacattgtttccataaaatgcagcttcgatgatagaacgtgtttttgaaaaacctggttttccagcaccgatttcgttaattggataataagcttttgttgacatattcgatatcctccttaaattccgaatttgcattcattatctcattttgttttcaaaatgtcaatctttttattgaaattttacaatttttatcattcatttatacctcatttttttgttgaatttattgaaaaactaagaaaaatgcaggattatttttattttcctgcatttttatcgtatctcgtgtgtttttgtcctttatttacatggcactcacatagtattatgcaatttatttgttaaaaaattcactatgcattctttttgcaaagtgcactgtaataatatttcaattttttcgcctgacagagcacatccctctcctttgctctcattctaccactatctatcaaaagcggtatctgacactgcaatatctgatggacacgcacccagaattcatcgttatttttacatttatacacatcccgcccatcctcaagccagtttttataaaccggaatatctcttaaaataaccggaatctgcgaggagagtgcttccagtacaacaattccttctgtctcctcatacgatggaaataaaaagagatcacaactgctgtacgccttctttaactcttcctttggtacatatcctgcaaatgtcagattcggcaaatccgtgtgaatcgcatctctgaccttctttggaatctgaagttctggtgtatatccaaaccaaataaactgatactccggcattctccctgccagttccacaaagtcaagaattccttttcgttcaaagtacagcccaaccgacattacaatcttgtcctcgttgcgaaatccatattttcttcgaaaagactctcgatccagtacatttttctggaattcacaagtatccactccgtttgaaatcacttctatcggattcttgatcccatatccgttcaatagcgattttgaatattccgtcggtgtcaggatcaaatctgccatctgataacatttcatgatccaccatttaaaaagaggcgccgtcagattggatcccacaaaggagtttcgaaaatcttcctttgtcgaatgggcatgatacactactttctttccttctctttttgccttctttgccatatgataatcacttggaaataccgtatttagatgcacaatatcaaaatcttcccgaggatcacaggtcagttctacctgctccgacttaagagcatttttttgcatggacattgcacgtccgactccacttctcgacacaatcttctcgtttttcgcataaagcaatactttcatttctctcatattctcctctccatacttccttttgatacagattcagtaccatatttccaaactgctctgtcccgaatttccgtgcgttgttccggctatgctccactgccttttccatccataaaggctcctttaagatacggctgacgatctctgaaaattcgtttaagttctcgtaagaataaccatttccgccttcctcaagtaccccgtacaggcaggcatctttcctgcacacaagcggtaatccactcgccatcgcctctatataggtaagtccctgtgtctcacttgtcgatgcacagacaaaaagatctcctaactgataataatttgctatatcttccggtgctgccatcccagtaaattttacataagttccaagtcgaagtttctctgtcagttcctccagacttgctctcgctggtccatccccgacaatcagcagccgcacattttccccatgtttgaccaaatgacacattccataaattaattcatcgactcgtttttcaaatccaagtcttccaagacttaacaacaccctcgcctcctgtggaatatcatacttgatccgaagctgtttgattttttcctcctcacacggttgctgaaatttatcgagacagattcctgatggaatcaccgcaatttcactctctgtcaatccatattctctgagcgtacgttccaccttctttgttggagcaatcacagcatctacacaagacagccgcattttcatccattttccaagcatctctcgacttacgttttttccaaacggaacatactctgtatactgctcatacaacgtatgataagtatgcagcaatattgctcctgttttccttgcaattcgttttgcaaagccaaaactaaaaaattcacactgactgtgaatgacatctggattccactcgataatctcctgcacatatgccctgccccgcgataccggaattcgcacatccggatagatttttgccggaacagaacgaatatagtacacattttccatctgataggtactgcatgtatctgacactgcaagaatctttacctcgtgtccgttcttctctaattccctctccaaattcaagacagatgtcacgacaccgttgattgcaggcctaaacaaatctgttgtaataagtatcttcataatgctctcctccttttgtctatatcaactgcaaaccactgatccacgttcccgcatagacaagtgccagactatagatggcaatcgatcctggttttccaagtaaaataatggcagaaaaccgcttccatgacatctttgtaagtcccgccaacatacacaaaaaatcatccggcgcacatggaaagaaaatcgcaactgcaaaaaacttatcaaatttctttcctttttcaagccattgtgcatatttttcatatgtttcttctttgacaaaatcttttacaaaacactgtccataccgccttgcaagataaaaattaatcatcgatccaatcacaatcccgatataattgtatagaagtcccatccatggtccaaacaaaatcacacctgctgcacaggaaatcccgccagggataatcggaactaccacttgtaccatctgaatgaagataaagaacagtggtccaaagattcctccccgctctatcaacatttccatcttcgtccggtctgtaaacagtccgttctgcattccatatattacaaacaataccattgctgttatgctgactgctgttaaaaaatgaatcgtatatctcactgattgcttactcatctacatacccccttttgtatactccttatcatatcagcataaatttaagttatcttgaggggattattaagaaaaatgaaagattttctttggatattcaaaatacaatccgacctttattttttatagattttatctggttttcatttctttcatctgcgttttatgatacaatctacaaaacagcgaatcatgaaactttttgttttacctgattgccaacagcaatgtagtaatgcacatgtaataacagtagaataaaggagttttttatgatagagataaaaaaagtcactacaaacaagaaacaatatctgcctcttctgctccttgcagatgagcaggaggatatgatcgatcgctatctggaacgtggtactatgtacatactggacgacaatggagtcaaaggggtctgtgttgtcaccgatgaaggtgatggtattctggagataaaaaacattgcaacggattcacatttccaccggaaaggctatggcagaatgctgatcaaatttatagaggaaacctaccacaatcagtattccatcctccaggttggtaccggagacagtccgcttaccattccattttatgaagcctgcggatttgtccgctcccatgcagtaaaagatttttttgttaaaaactacgaccatacgatctatgaatgtggcattcagttaaaagatatgatttatcttcgaaaaaacctcttatagagccaaaaaaagaagcaaaaaccattgcaagattctctcctgcaaggcttttgcttcttttattccgttcttttttctctttctattctccgatacgctcaaataccatatcgtatccatcatttccatagttcaatgaccgattgacacggctgatcgtcgctgtagatgcgccggtcttctcggcgatctccaaatatgtcttctgttcccgaagcatcttggccacctcaaaacgctgtgataatgacattaactcattaatcgtacagatatcttcaaagaaagtgtaacactcggctttatctttcaaactcaaaattgcatcaaacaatagatctgtcgcttccgtcctaatctgcttactcattcttttctctcctttgtcagactcttatctgtcctctattttatcacagtaaatttgtaaagtccactgattttttcatctgacaactcctatccctttggacatcttcctatatactttttcaatttctctatcgacgtattgacgaccagctcctccgggaatccacattctcgtacaacttccagagaataacgcacatttcccacatcactatctacatgtgcatcactggcaagtgtcacaggtactttatattttttgcaaagttccaaaatcgtatgttgattctcacgcgcattctgacggaaccctcccggtgtcagagaggagttattcacctctaagatttttccatactttgcagcagcctccacgattttttcataatctaccgggatccttccgtcgtcgggatgcccgatgatattcacatatggatttttcatcacttttaaataagcttccgtatatatttccttagttgcaccttttgcaaaacatggaagatgcagacttgcaatgacaagatccatctcttttaacagtgcttctgaaagatcaattgttccatctgcatctaaaatatttaactccacaccaaaaagcatctccactcccgacatttgcctcggaatcacttttaaattagaaaaataaaatggatgacaggttcccggcatcgttggagcatgttctgtaatcgcaagtccttgcaatcccttctttgcagctgccgatgccatttcacgaatcgtacagtatgcatgtccgctcgcaatcgtatgtgaatgtgtatctattgcaatcttcataatacttcctcttttctatctcgatttttttatttttgctcattgttcttacctgagttctctcttgacaatttttattataccatcgcctttctgcatttgaaaacataatttttctcctttccgctcatactatttatgatatcttttctatcttaaaaaaaattattaccggatatcaacgacttacagacgggaaaggagttttttatgaaaccaattactgaacaatctgcaaaaggcggtacagctgcacctgccggaaaaatctcttctgatactcagccaatttccgaacaaacactaaccaatcaggagatcattgactcttacgattatctttcttctgcagcttctgcatgggactgcacaggactgattccttctgcaccgtcctcctctgctgaactggaatcctatgaggcaatctatccgtttgaacctcctaaactggattcgaatgaaagtggtgccacaaaatattcttctgcatatactggtgaaaaacaggagtaatattttatgcctaacttttcttttgtcccgctggaaggaacgattcaaaacattcgtcctttcggcgatgaatgttgcagctcccttgtcactttgcagacatctgaaggtactgtcacagttgtcgtatcaagtaatacgtatgtcatcagtgaagtacgccttcgccgcggcatgactgtcgcggctttttacgatgcccaggttcctgttccacttatctatcctcctcagtaccgtgctgtcatccttgggaggaaacagccaaatgaaactatcaccgtagactattttgatgaaactctcacaaacaacgacaatacactaaaactaaatgtttcccccgccaccgacatcgtcggatcaaatgggcagccattccgctgctctcttgcggatcgccttttgatcgtctattacacaaattccacgaaaagcattcccgctcagattgtcccgaggaagattattgttatgtgctgacttccttgcacaaaactctgttttgatccgctatggcacgaaacacaatgcaaaaggcggcagttacttctgccgcctacaactacttttttctttttttaccatcctcttagcaaacagaagaagcacatacattctcaagaatctctgtcaatgcactcttgctacttgtatgacatcgcacaatgtctgcgttgcatttctctgcttctgcaactgcacagcgtaccatcttgtgagatacggtattcgtaaacaagatcagcagatccggagtgccaatctgttcacttagatttgcagacatctgtgtaaatactttcgctttacacttataccctttacatatttttttatactgacaaaccatccggtcatggcctcctacaattacaacgctcatctttctgtcctttcttttctcttctgtctacaaagctgcaagatttttcccgagctcttcacacttttccaatgcctcctgatccggtgtctcctgacagatcacaccttctcctccgatgacatttgctcccgcctgctgcatacgcgcttcccagtctctcatccattctccatctccccatccgtaagaaccgaacaagccaactgtctttcctttcacaaatgcttccaatgtttccacaaaaggctccatctctgattcttccagcacttccgcccccatcgccgggcagccaagtgcaaacactgcctcttcctttaattcttctggtgagatgcttcccacctctacaaccgcactttcttttccttctgaacggattccccttgcgaccgcttcagccatcgcctctgtatttcctgtctgtgaccaatatactacataaattttatccatgatcttcctccttatcttttccttgtctctgcttcttttttcatcgacaatgtatttttatgccacacatccccggactagttcttctatccgaattcctctggcaaccgcttggatcaatgcttcttttgcctcttcaaatgcctgaaacaggcaaatcttctctcccatattcgtgtatactttccaatatcctgcataaagataatttttgcctttctgctctataaatcctgtgacatcatcgagcggatatccaagaagcagacccatctcatgcggaaacattcctcctgctgtcatataagattcgtaacgtttctgaaaggtatacaaaatagctcctaatgtcaactgcccatatccttctttctgaaagaaatccctcatctttggatgttctatcacttgttctagatcttttctgcgatatagaagatatgtgatcttttctgtcgtccggagtagccggaaataagagattcctgagtgcttcaaaaccatttttactgctgtttcattctccgctggaatgataaaaagattagaaactttcagtcccatgatcaatggtgcacattgcagagcaagctgtgtttcgatctttttgaaatccatccccttcacaagttcaaatatttcctgactcatgtttcctccttctcttgttagttgtttctaatttatgtttatattatctaattcaagttgattcgtcaatacttttattgatctatttttctcaataatctttccgttaaaaaagaagaagtatcctgccatctgtacagacagcaaggatacttcttatctctcacacgctttttgatatgctattccattaaatttttcatactatccagcccaatgaatagtgttgatgtattatgaaacaatgcagaggctgtcggctgcagaattcctgccactccaagggcaatgagtgcagcgttaattccaacaatcagtcgataatttcttccaatccgctgcatcaatctgtcactgagtctcttcaacaaaacaagttcatacaagttatctgcactgattgtaatgtccgcaatctcccttgcaagctctgcgccgtcactgattgcaatgccgacatctgccgctgacagcgccggagaatcattgatgccatctccaatcataataactttctttccttttgctctctccttctccacaaatctcgctttctcttccggaagcacctccgaatcataatcatccacgcccactcttttcgcaatggaagctgctgtccgttcactgtccccagtcatcataacaatatttgcaatcccctcctcttttagcaggcggatcacttccactgcttcgtcccgcagaggatcttcgatgcggatcactgctgcaagctcctgttccatcgcgagatagagatgtgagtattccccggaaagactctcaaaaagttcttcttttccttctggaatccgacacttctcatcttcaaatacaaaatgatagcttcctatcaccgctcgctttccttcaatctctgttgagattccatgggctaccatatactctactttggaatgcatttcttcatgttccagattccgcttcttggccgcatacacaaccgctttggccatggaatgtggaaaatgctcttccatacatgccgccactcttaacagttcatccggatcatctccattaaacgatatgacatccacaaccgtcggatgagcttttgtgagtgttcctgtcttatcaaaaacaatcgtgtctgcttctgcaacagcttctaggtactttccgccttttacagtcagatgatatttgctcgcctcacgaatagctgatagtactgagatcggcattgccagtttcatcgcgcaggaaaaatctaccatcagtaccgagagcgcctttgtcacatttcttgtcagaaggtatattagtcctgtgcctgcaaacgtatatggaaccaactgatccgccaaatgttctgcctttccttccagcgaagactttaacttctcggatgcttcaatcatcgtcacgattttttcaaatctgctcgaaccaccagtcttctccacacgcagggtaatctctccttcttccaataccgttccggcatagacagaatcttcactgcttcttcttaccggaacagactctccagtcaacgcagcttgattaatcatagcctctccttctattacagtaccgtcaaacgggataacgtttcccatatgtacaacgattaaatctcctttttttacggttgatgccgcaacaaggatttcctgatcattcttttttatccatactttttctacattgagcgacatcatacgcgcaaggtcatccacagactttttatgtgtccactcctccagcaattctccgatagaaaggaaaaacataatggaagatgctgtgtcaaagtcatttctcagaatcgaaacgccgatggcagtcgcatcaagaaccggaacttctatttttcctttacacagtatttttaatccctgataaatatatttgacagacattgcagccgtatacagtgccgtcatcggataaggcagaaaccacttacgcatccatcggaataaaattttatctataattttttcctgatatgctgcattcagtgccctgcctgatgtctcaagtacttcattcggaacaactaccttatcataacaaaagctacgcagcatttccaatattctacgtcgctctcccttgtaacgaatgaccgcatccccagtgcgctcgtatactttcgcagagattacttcacttttattttccagataataaagtaatgtatccgcctgtcggtatgtcattgtacttcccagaaaatgcacccgcattcgtccctctatttcatgttttatcttaaatctcactgtttaccccttttccatatgtagaacaactaaaaggaaacacctgctgatcctgttcgccttttggcaagaaatccgcaagtgttctctctgttaattccatcctgttctctgcaattagagttctctcttcgtttcatcatcagtacaagtttccgacgcaacttcttcgacctcttcaaatacgtcttcctcttcttccgaagcacgttttgcgttaatctcctttgcttcctcgtaaatatcctctgcattctcctggattgttgttgctgtcttcatcacacattcttttgctctgagtactgctgcggtacagtttgtatacactttcttcgcatctttactcgcaagcagctttactcctgctgtaccaaacaaaactcctgccgcaaagattcctgtcttcttcatgttaatacatttaaaacaatctaacatttttatccctcctagatttatttatgtttgtagcctgtgtagagtgtcatgaacagacatgcgaccattgcccatgcccaaaatctatggtttttcatctgcctcttccctcctacaatatttttgtcattataatcctgcctgcggataatttccattatttttctgttattgagaaattttatcttttaaagtcctatcacgatcagtctcaaacacaagactcaatcacaactgcttttactttttgcgttccgatgtatccacagcttttcagccctgcaagaatcacttcattccagttttttgatgacaggtaccgtacagtatgatcctccatctcaattctgcatacttctctgctgccattttcctcatcgcaggcaattttatacatattcttcctgctgatcgcaccaatctcctccagcttattgacaagacgatataccgttgccgtcccaattcccggatcaagcttagatgcccggtaaaaaatttccttgcaggaagaacagtcttcttccaatataatatccaaaaggatctgcctctgttgcgtaatccggcagccttgctcccgaagtttctgaagaaccatctcttttttcatctttgtccgccgatagttgcctgtctcatttacttttttaatctgtcctgtcatgttttggctcataccgtcctttccaaaatgaaaactatttctctctaatgacagtgcccaccacaatgtttacaatctccgccacagtgaagtgatttcccatttttcttatcttttaccatgcttctcactgcgagcgctactaaccctacaacgatcattcctgcaacaattgttcccatattccttcctcctttttaataatttttcagtttataacctatctctttcctatgaaaaaaagactgcctcagagaactcctccgaaccggcagtctttcttatttctattttgcacctgccattgctttcatattgacatgaagtgtcttgctttctttatatggacgtacaagcagatacataaatccaatcacaagtaaacatgcgactgctgtggcaataccaaatgttccggtagtaatccaagttccaatctggtaaacacagagagaaacaacatacgccaacaatgtctgataaccgactgcaaaccaaaaccattttgcattgttcatctctcttttgatcgctcccatcgctgcaaagcaaggagcgcaaagcagattgaataccaggaaagaatatgccgcaactgctgtcatgcttcctgcaagcgcaccccatatctctgctccatcttctgctacttccgcaaatccaaacaaaataccaaaggttcctactacattttcttttgcaatcagacccgttactgctgcaactgccatcttccagtctccccatccaagcggcgcaaatactggtgcgatcacacttcctatcttcgcaaggatactgctgtcaagctgttctgcttccaacattccaaaagagccgtcactccatccaaaattcatcaaaaaccacagtacgatggtcgatagcaaaataatcgttcccgcttttttgataaaagaaaatcctctttcccacatgcttctcaacacatttccgactgtcggcatatgatatgcaggaagttccataacaaacggagccggatcacccgcaaacatctttgtctttttcagaataattccagagcaaataatcgccgcaattcccacaaagtaagcactcggcgctacccaccaggcaccgtcaaagagcgcccctgcaatcagtgcaataattggaagctttgctccacatgggataaaagttgttgtcataattgtcatttttcgatctctgtcgttttcgattgtcctggatgccataatcccaggaactccgcatccacttccgatcagcatcgggataaatgattttccggataagccaaacttgcggaaaattctatccataataaatgcaactctcgccatgtatccacacgcttctaaaaatgcaaggaaaataaagagcacaagcatctgtggaacaaaaccaagaaccgctcctacaccggcaacaattccatccagaatcaatgcctgcagccagtctgcacaaccgattgcatttaacgcactttctacaagaaccggaacacccggaaccgagattccaaaaaagctccatccatctccgaatacaccgtcatttgcccaatctgtcgcccacgttcctactgtcgtcacagatacatagtagacaagaaacatcactgccgcaaaaatcggcaatgccaaccatctgtttgtcacgatacggtcaattttatcggaagttgtcaatttttccttagatcctttcgtcacacaagatccaatgatagaggaaatatacgtatatcgttcattggtgatcacgctctctgtgtcatcatcaaacacgttctccatttcctggatttctgtactgacatccggaacgcgttccatctgagatccaatcttatcatctctttctaacagttttattgcaaagaaacgtttctgttgttcttctacaattccggttagcttttcttctacttttctaatgatcagctctgcttctttggagaactcatgtacaggcaccaccgctttgttctgccgtgcaagtcccaccgctttctctgctgctttcttgatgccggttcctttcaatgcagaaatctcaacaacctcacatccaagttttttgctgagctcctgaatatggatacgatcgccattcttctccaacacatcaatcatattgactgccatcacaaccggaattccaagttccctcagctgcgtggaaagatacagattcctctcaatattcgttccatccacaatatttaaaattgcatccggacactccccgattagataatttcttgccacaacttcttccagtgtatatggggataaagaataaattcccggcaagtccatgatcacaacatctttatgtccctttaacttcccctcttttttttctaccgtaactcccggccagttcccgacaaattggttggaacctgtcagtgcattaaacaacgttgtctttccgcagtttggattccctgcaagtgctatttttactgacatactacttctccttttttcttattccttttttactaattttctttgtttgtttcacctttctttcgttagcattcgctaaccagtgggcaaaaaaaattattctacttctatcatctgggcatctgcttttctcagcgacaattcatatcctctgaccgtcacttcaatcggatctccaagaggcgctacctttctcacaaaaacatctaccccttttgtaattcccatatccataattctgcgcttgaccggtccctcccctgtcagcttttttaccttcaccgtcttgccgcaaggtatcttgttcaatgtgttcataatttttctcattcctttctatcagatcttattttctaaatctgttttattctgcgcttctatgacgattgtttgtctcgcagtgttttaaacaataattttattcgccatatctttcccaatcgcgattcgggcacctttgatctcaacaatcatatttcctccatttgtagaaatgactgtcacaaccccgcccggaacaaatccaagattttcaagaaatcgacgtgtttcttcttttcccccgattcttatgatcgtgttcggttcatttacacttaccatcgtcagcggcatactatcatcttctttctctgttgaaattgataaacattttcatctgttgattagtataatctaattactattagttgtcaattacttttttgttttatttttcattttattgatctccgtgacagcttcgctcttcctcagtatttatttgtatttttttcgccactatgttatactactttcagtttcatgtaatttttttaaagcaaaaataaatttctatttggaaaaggaggcgaagattttgagaacttttggaaatgagtctgcagaaaattacttggaaaccattcttgttctaagtaaaaagctcccggttgtacgctctgtcgatatcgcaaacgaactgggattcaaaaaatccagtgtcagtgtcgctatgaaaaatcttcgtgagaagaagcatattactgtgtcagaagccggtttcattttcctgacagattccgggcgcgagattgcagagatgatctatgaacgccatgaatttctgactgactggcttgtgaaactaggtgtatccgaggaaatcgcttccgaagatgcatgccggattgaacatgtgatcagcagtgagagctttgaagcgattaagcgtcatattccatctgagcgataattttaaaagagtatttctctataataaaaaagtgtgcctcacaggttaatctcatggattctcctgcgaagcacacttttattttctatatacttttctatgcgaagccgcttccttttcttctttctctttgtcgacaaacatcagaagaaatgctgctgcaagaagtcccgcactgacgagaatcgcttttccatgcagatatctgatacaagcatttccaagcacagctcccatcacaaaacaaataataatcccataatagagcattcccttctccactgccttccgattttttgtactccaatattcacaaaggttctgtgtagcactcctcaaatttccgatacacatcgttgtggcaattccctgcccgtgaattttacgaaaactttccacctggattccacacgcaaacgaaattagactgtttgcaactgtgttcatgctctgtggaaaaaatgcaacacaaataaggacaaatgcctctatcaacacacaaatctggcgccaatgaaaattcttctcatctgtcttcatgcgtacgatatctgccaatgcgattccaaccacaaaagcactgattggaaacagataatgcagcgctgccgtccagttcttctccgccaactgaattccaaatagcaaaatatttcctgtttgtgcattggcaaatacatggtctctgtaaatataagaataggcatccatcaatccgcctgacaaagcaagcaaaattccaagttcaatggattctgacatctgttttgaacgtttcatctcatccccggctttcttttccttttatgtggaacaaaacaatctatcttacgaaagtctatttttgaaatcttcataaccgaatgtccgcacaagatgttcttctccttcttgatcgcggaaaacaatcgatggaagtgccattccgttgaacgtatttgtctttaccatcgtataaagcgccatatcttcaaataccacacggcttccttctgtaagcggtttttcaaaagaatagtcaccgatcacatctcctgcaagacaggttggaccggcaaatcggtaagtatattgtttttctcccggattgcctgacttctgtaccggtggacggtacggcatctccagtacatccggcatatgacatgctgccgatgtatccagtatggcaatctccatattattatgcacgatttccatcacacttgcaacaagatctcccgcatttaatacgactgcctctcctggttccaggtaaacttccaattggtatttttctctcagacggcggataatcctcacaagtcgctttcgatcataatctgctcttgtgatatgatgtcctcctccgagattcaaccacttcatctgcggaagccactttccaaacttatcctccagcgcttcgaccgtcttctccaaatcatccgagttctgctcacagagcgtgtgcatatgaattccatcgagaagcggtacgagctcctcctcaaatgcttctaatgttgttccaagccgtgaacccggtgcgcatgggtcgtaaatggcatggccctcctgtgtggaacactccggattgacacgcagtccgatagattttcccgcattctttgcgcgaatcccatattttcttacctgtgccggagagttaaatacaagatcatctacatactggagcaattcgtcaaattcctccgcccgatatgccggggagaacacatgtgtctccccgccaaactcttctttgccaagtcttgcctcataaagaccacttgccgtagtcccgcaaagatactttctaagaagcggatagacagaaaacatcgagaatgctttttgcgccaaaaggatcttacatccactttcttctgccacctgctttaaaatctcaagattgtgaagcagtcttcgctcatccacaacaaaatatggtgtacagactacttccttccccatgctgctcattagtccaccagcactggattgtgagattcgatccatggaagtccccatgtattgagcgcatccataaacggatctggatcaaactcttcgatgttatgtacacccggtttgttccattttccagtcatgatcatcatcgcaccaatcatcgccggcactccagttgtatatgccacagcctgcgacccaacttctttgtagcattcttgatgatcacaaatattatataactgatatgtcttttcctttccatctttctttccctggaaaatacatccgatattggtctttccttttgtacgcggtcccagtgaagaaggatccggaaggactgcttttaagaactgtaacgggatgatctcttttccttcatacatgatcggctcgatcgaagtcattcccacattttccaggcattttaaatgtgtcagataactctgtccaaatgtcatgaagaaacgaattctcttgattcccggaatatttaatgcaagactttcgatctcctcatggtggagcagatacatatctttctctccgactccatcaaaattataaactcttttaatctccatcggctctgtctctacccattttccatcttcccagtaagaaccttttgcggatacttcgcgaatattgatttccggattgaagtttgtcgcaaacgggtacccatgatctccgccgttgcagtctaaaatatcgatatagttgatttcatcaaattcatgttttaatgcatatgcggagaaaacacttgtcacacccggatcaaatccgcttccaagaagtgctgtgatccctgccttttcaaaacgttctctgtacgcccactgccagctgtactcaaattttgccgtatcttccggctcgtagttcgctgtatctacatagtgtgtctttgtcgcaagacatgcatccatgatcgtcaaatcctggtatggaagcgcaagatttaagacaacatccggtttttccttttcgatcagtgcaatcagttcttccacgttatccgcatctacctgtgcagttgtgatctttgtttttgtcgttccttcgagtttttctttcagcgcatcgcattttgattttgttctgctcgcaagacaaatctcttcaaatacctcactgttctgacagcatttatgcactgccactgaagcaactcctccacatcctacaatcaacactttacccattttttgttcctccttgtttctttcctcttgtttttctttcattttttgtttaacttcttcggaaacttttctacttactcagcgcaagcaacatttctcttacaatcttacatgccgccgctgttgagatgccgcttggatcatagtgcggactcaattcatttacatcgcaggcgacaacatttgcccggctgcacactttctcagctgcttttctcagtgcatcaaaggtaactcctcccggctccggtgtcccggttcccggaaagacagatggatccaacacatccagatccagtgtgaaataaatcggcgttccttccagtttctccaacacttcctcaagtccctcaaagtcaaattttctcattgtcacatgctcttttgcccaataaaattcttcccggtcaccggaacggataccaaattggtaaattcttccgtctccgacaagatcccagcatcttcggatcaccgaagcatgcgaaagctgctctcctaaatattcttcccgcaagtccgcatgggcatcaaaatgaatgatatggatatccggatatttttccaaaactgccctaaatgcaccaagcgtcacaagatgctctcctccgagcataaatgggattgcagagttatctaagatttcttttgcctgttcttcaatctgcgcaagcgccttttttgtatttccaaagcaaagctccagatctccacaatccatcaccttcgtatcttccaaatctttgtcctggtaaggactgtagcactcgatcccataagattctctgcggattgcactgcttccaaaccgtgtgccgggccggtaagacgtcgtcgaatcaaacggcgcaccgaacaatacgatgtccgcctcatgtgcttccttttcacatgccataaatacttctacatttttattcaacattttctaacatctcctctacgtagtacggcagataaaacgctcccttgtggagtgtcgtcgtataatatctgcaagagattcctctcatgttccatgcaatatcatttaagtctctgagcggatgatatttttttgatgcgaatccaaacagccagtgtccggacggataggtcggaatgtgcgcatggtacaccttgctgatcgggaaagattccacgatccgtttgtgcattctctggcaggaaatagcatcttcatcataaaatggactttcatgctggttgatcatgattccgtcctctttcaaggctttgttacaatttccataaaactctcttgtaaaaagtccttcgcccggtccaaatggatccgtcgagtcaacaatgatcagatcgtactgattttcccggctccgcacaaaccgaagcccatcctcataatggatctccaccctcggatcatctagccggcaggcagtctgtggaagatatttcctgcacacttccacaacctgctcatcgatttccaccatatcaatgtgtgcaatttccggatactttgtcagctctcggataatccctccgtctcccgcgccgatcacaagcacatttttcacggatggatgcaccgccatcggaatatgtgtcatcatctcatgataaataaattcatccttctccgtcagcataatgtaaccatccaacacaagcattcggccgaactccggcgactcaaacacatcaatccgttggaattcactttttccactataaagctgtctgtcaactctcactgaaaattttacatgaggtgtctgtacctcagaaaaccatagttccatcttccctacactcctttcagcacattcagccgctcaatgtccggatcttccggtccggtcatagagcatcccttgtcttttgcataaacaatgtattccagaatctcttctgtaattttctcccccggtgccagaatcggaattcccggaggatagcacatcacaaattcactgcacactctccctgcactttcctttagtggaagtgattccttctccgcataaaaggctgtctgcggagaaacgatcaccttcggttcgatatattcctgggaaagaaggcctacgcttggtcccccaaatcttctccgcacttccgaaagcgcactgacaaggcgctcgatatccctcgggcgatctccgatggaaagatatgcaagaatatttccaagatcaccaaactcgatctgaatatcatattcatcccgcaggagatcatacacttcaatccccgcaagcccgatttctcttgtatgtaccgacaacttcgtgatatcaaaatcatagatgctgtctccattgcaaatttccttcccataggcatagtacccaccgatttgattgatctcttctctcgcatactctgccatccggattactttttcaaatatttctttcccgcgaagcgccagattccttctggaaatgtcaaggcttgacaacagcaagtaggaaccacttgtcgtctgtgtcagattaatgatctgcctgacatacccttcatgcacctccggtccggtcaaaagaagagagctctgcgtcagacttccccccgacttatgcatcgatactgctgccatgtctgccccgcacgccatcgcagatgccggaagattatccccaaagtaaaaatgtgtgccatgcgcctcatcggcaaggcagagcatcccatggacatgtgcaagcgctacgatacttcttaaatcagaacagatcccatagtaagtcggattgttaacaagcaccgctttcgcatccggattttccagaattgccttctcaactgctttcacactcatcccaagcggaatccccagtctgtcatcgcactccggattgacgtataccggaatcgctccgcacaacaccattgctcccatcacgctccggtgtacatttctcggaagaatgatcttctcccctcgcttcacagtggaaagcaccatactctgtaccgccgaggttgttcctccgaccatcagaaatgcatgtgctgctccaaatgcctctgccgccagttcctctgcttcccggatcaccgagattggatgacacagattgtctagcggcttcatagaattgacatccattcccacacatttttctcctaaaagctctgcaagctcgggatttcctctccctcttttatgtcccggcacgtcaaacggaacaactctttgctttctgaacgcttctaacgcctcgtagatcggcgctcttgtctgtgataatttttccattttttatcctcctgtcatggattcgttttcgtaacttcgattccatgatccggctgtctgaccagatatttctaactctctaaaaaatatttcttccactgaaaatctcaatcatttcccgcctcagactattgatgatctccagtcttttggtcggcggtaattcatagacatctgtcttaaacaaatagtcctgaagatccaactcttttaccatcatcttcgtgtgaaacaggtttgcctcgtacacattaatgtcaatcgcatcgtatcttcttaaaatctccggcataatgtattcctggatcgatgcaatcttgtggtccatgaacagtttcttcccatccacgtctcttgtaaatccccggatccgatagtccatcgtaataatatcagagtcaaacgactgaatcagataattcaatgtagaaagcggtgtaatctccccacatgttccaacttcaatatctacccggaacgtagcgagacagctctccggatggtattccggataagtatgaaccgtcacatgactcttatctaaatgcgcaagctgtatttcgccacttggcagtttgctctcctctgagattaaaattgtcacggaagccccctgaggctcataatcctgttttgcaatatttaagatttttgcaccgatcatgtccgtcagatttacaagaatattcgtaagcctctcggaattatattgctcatcaatatatgccacataatctttctgctcccgcgccgtcttcgcatagcagatatcataaatattaaaacttaatacctttgtaagattgttaaatccatacaatctgattttattttccatttgcctttcccccagcatattttccaatctgctctctgcgagtcgctatccccacacgcagtatctttttgattgcaagaactccaaagtaatttcccagacactaaaaaaacgcaaataatgtgaatccattccattacttgcgttttaatctatattttattctatctcaatctacatttctcctactgtaatcagtaatcgaaatctcttccattttttaatagaataacaaagcttagagtctatatagcaaatactttacttttactactcttattgaccatttcacaagttgatgcacgcattcacgcactggttataaagtaaccaacttataaaattgagcttctaactcaatcaataacggtaataatatcacctatcggcagttgacccggctgtccgtatggcctttccccacatctgtgggtggtcaataaatatttgcatggaacccgattgctctgttcttccatgtcttttccagtatacataatttttctgctattgtcaattaattcacattaaaaatcttgcccaggagccaaatatatcgagtactttgatccgaaatgctttcttgtcgctaagtttccttggcttttgtccttctttcagatcatactgactctcatctacaactttcaatgccctttcttcatactttgccatggcctgattcatctgtctggtcagttcctcactgtcagctacaagcatcagttctgtatctagataggcacttcgcatatcccagttaaaggagccgattccagtcagacgcccatcgatcgtaaaacattttccatggtaagaaacgccatcgtcatactccatgatctgtacgccagtgtcaatgattttcccccgatttctccgataatccatcgcaccaaatggattcccattgttcgctacagagttcgtcatcatccggatttctttttcaccttcacatacctctacaagctgtctcatcatccagtcattacagataatatagggtgtatgaaaaagcacttcatgatctgcctgcttcatcagttccgtcatctcataaaaaacaaccggctcttttgcatagacatgcgtcggatttgaaagcaatgtcatctttttcacttctactgtctcttctgtataatctttttccatgatccagtccggatgctcttttgcaatctccttgtaacgtctgcgcaattctccttctgccgttttcaccgacggattccacttccagatcgggctctttccatacagcttgcagtctgaaatcttccacacagatgaaaaataatctcttacctgctctaaagatgtgtctttctttccttctggtacacagacaagcatatcccagtcatagttttgatagcccggctggtctccgaggaagaagtcatatgtatttcttcctcctaaaatgtacattgaccggtctacgatcagatatttgtcatgaagacgtcccatgagtttccacggctgccagaaacgaagtggattatagattttgatctctacattttcctgtcctgcaagtgcaagaaaataaggatttccccagatggaagtcacataaggaaccccatccgttacgatggatactttcactcctcgatctgccgcatccaataatgcagcaagcacctgctttccactgatatctgcctttatatcataggtagataaaataatctcttccttcgcctgcgaaatcatgcggatccgctcctccaaagcttccccattttccggtatgattttcgcccgctctcccgatgcgctttctccataaaatttttctacactgaaatttttctttgtttcttctgtaattttaggctgttttaaataaggaatcagaacaactgcaataattacaacaatgatacatactgtcagtatgattttccacatacgacctctcctgcctttcttcttcgattccccttcctctctctcctgaatgtttgcttcctgctttttcttatcctccttctctttctcagaagcattccctatttcctttttttggtttcctcctgcaatactcttccacaccttccagtacatcttcaaatataatgccaaggaactaagcatgactatgattgcaattccagcaagaacattgacgatcaaaatcgacatgcccggaagaatcaatacaaggatcatcacaagatcaagtaccgctgtacatacctttccatgcttctgtgctccatccatccgataattttttttcatcatatataagccaagtattgccatcaggcactcttttcctaaaaacacgaacagcaaaatccccatcgccggatatttgtaggaaaaactgatcgccatcgccccttgtgtcaacttatctgccacagggtctaaaatcttcccaaattccgtcaccatatcgaatcttcttgcaatctttccatcaaaaagatctgtcaggaaagaaacaagcagcacaactgcagccatataatattcttccgttgtctccgcccgaatataaaggaataaatataccgggatcaacaaaatccgaaaatatcccatcaagttcggaatggaaaaatattcctttaacacgcgttctttcatacgcttctcctcctttgaatgtaacaaatatagcatatttgactcaaaaatcaatatccctttctaaaaaagaaacaaaccctccacttttgtttctgtctgtcggaagattttccatgcaataaaaataccttcggaagacactctgtattttgtgtccgccaaaggtacttttcttttccatatatctgtttctattttctactgcttcctgatttactgaccactctgtctgctacacttctgcctgtttttgttccgttgcctgtgcctgattctgctcttctgacggttgttttggacgtgccatatccaatttgatattcactgcatttggattaatgatcacaccttttgcctccggcgccagaaattttggcagatttgaaaactctatgatcgctgcctttaagtttttctctttgttaaacttgttaaattcttgaatatctgtaaataatggctgatacatttgtccatccttttctctcagaatcggaatctgctgcccttctttctgtactgcaacaatatatttccccctacggaaatgtgccagcatctcttcatttaactctttaatttcttcagtaatcccgccctctctcttcttgcgaaattcctgtgcaaaatacagcgccgtcaaatgtaactccggattctcaatacggatctgtccctctggaagatggtctccatctggtcttcggatcagttcatctaactgaaccaccgtctcgatctgtgttcctttattcaccctcagacaatttgccccaattggaagcaggctgatgtaaaatgccagcaaggactcattctttactgatacaacctgaaccggttctccctgctgcagaagacggactgcctcctgctttgctgcctgctcattgacaaatacaattacctcatcgtcatatgtctccggatcacagacaacatacggcatctttgtgcatacagacatcaacacataaatggtttccgcatgccgtaaaagtggcaatgtatttcttttgatttcctccgcgctcagttctttttcactcattcttcaaacccgttccttcctgtcaaccgcctcttgccatcaaatcaacggctaacgatactatcctaaagcggaatcttccgcactttgtgcccttggaaagttccctttctttttgcaccacaataaatttattatacatgatatgtcattcaaagtatagatgtaaccgaaaaactttttcaaaaaccagtacaaaaaatgccctgcccaatgatgatatttcatcaggcagagcatattttttctgtactgtctaattagtatgtatcttccgtcgccttactcgataatgatctcaaattctgatccaatttctctggatttgtaagttttcccatggctctttgcatacttttccacattcatcttctgattcacttcactgacaagcactttcaccggacctttttcattttttaatgcatctgctgtcatcatcagcggttccggacaagaaagtcctcttgcatctacttctttcatactgtcgacctctcttcgttctgatatttcttctgctttattttcgcttatttcctgcaaatgcaatgatcagcagaacaacaatgcagattacccctgcaatttttccctggatcgcaggtcctccgacaactgcctccgtctctgctgtggcagccgctgctgctgcagaagcaagcttcagattatgacaaagtgcagaacctacaaacattcctgcaactgtcactgctgcatccgaagatccctgtccagccaatacaagctgacggagcggacatccgcctgcaagtgttgctgccagccctacaatatacattccaagaatattccacaaatgttgtgcatgtgcaaccggctgtcctgaaaagctcagatggaaatttccagttgcaatgttgtagatcagcatcactccaaacagagctgcaatcactgagaacaagtcaaagtttttcattaacataatatcacggatacttcctgcaaaacacattctcgttttctgcgcaagtgctccaaatacaattcctccgatcagcgctaaccacaccggtgcatgcatacttccaggtcctttctcacttgcgatcaaaagagaagatcccatcagaatcatcacaagaatgccaagcattaataccggaagcacggcaccattcatcttatttgtctcgtgtgctcttccaagactgaatccctgctttaatgctacaattcctgttgcgattcctgctacaaatccaatcaatcctacgtaagcattcagatctcctgctgccatacgaagtaccatacggagcggacagccaagaaacaataacgcaccgatcatgatgataataccaaggacaaaccggatcatcggagaagatccagctgttgaacggtactcttttgtcacaaccgaaataataaatgctcccaatacaatccctataatctccggtcttgcatactgtacgaccgccgcttgatgcatcccaagtgcccccgccgtatcacggatgaaacatgcgatacagatcgccatatttccgggatttcccaaaattgccagcagtactgctaccactccacaaatagcacctcctactgccagctttgcttttgaatctgttaaattcatctcattccctcctagtttcttctgtttcttcaaaatccgtctctccgacaggttttttctctgtgagtctgttcttgcattttaccaacaaatttcaagaaacacgctctactatcagtataggtttctatattgtcttcgtccaatcattatttataataaatggacactatttatagttttcttctataaacagtgtccacacttcttttctctttcaaaaatcttctatttttacaaaatcaaaagtaatactgccacgatcagcacaatgctgactacaattgagatggaattcaccgcacttgctaaccccacatctcctttcaaatctccggtaaatgccggtgctgccgaggcaatcggactaaaacagagaatcacaagcgcctggcgatattccaacggaaacggaagcaaaaagtaaaaggcaagcgccaatacgattgataccgcataccgggcactcaagatttttacaattttcccaatctgttcccggtttccggacaatttaaatccaacaccgatcatcagcatcgccataaaggcatttccatttgcaatgatttttgtaaacgatacaaccggagccggaaggctaagatgcagtaacgataacacagtcatcagaagatatgcatcaaacggcacagactttaacagtgtcttaaaaatcgtcctgatcttaaatccaccgccttccccctttgccatagaagcaatgctgtatgcacctccaagacagataaaggaattccccgaatcaaacagacttgttgccacaatccccgctggtccaagaaaactctgcacaaacggcattgtaaaatttccaatattatacccactcatatttaaaatagaaaatgcacgctcttcctttgacttccccgcactgatcaaccatgcagtcccaatcaggatcacaccacccccaagtccgagaaggctgatcagaagcatggatggttccaaactcatccccgaaaagttagaaacgattgccgcaggaagtgtgatcttcagcacgatccttgaaatgacataaaaatcctcttccttaaaaaatcctcgactgcgcaacacatagccgagaataataattgcaacaaacgaaaacgcctgcatcaatatttctcccataacatctctcccaaatattttattttcataaactcttcctgtttcggttattcactataccataactttcctaaaaaaagcaacatggcagtcaatcttcgattgttctattttggaaacacatttttctatcatttcatatactaatagaaatcatacaaatcttttggaggaaaagattatgaaaaagcgaccaattgtatatttaattaccgctgctcttctcacacttaccgtcagtggatgtggcagcgaaaaaacagaaaagcaaacaaagcaaccgacagaaaaagagcctactaaagtcattttaaacgaagtcgcacactctattttctatgcaccgatgtatgcggcaatcgaaaacggatactttgaggatgagggtcttgatatcactgtcattactggatttggtgccgataagacaatgaccgccgttctctccggcgaggcagatatcggctttatgggatcagaagcttccatctacacttacaacgaaggggctaatgattatgtcgtcaactttgcacagctgacacagcgcgcaggcaacttccttgtcgcccgggaagaaatgccggatttctcatgggatgatctaaaaggaaagaaagtacttggtgggcgaaaaggttgcgtacatatattaatgtaaatttagagagtattgtgattctatgtaactgggtggacagaatgaatagtgcgaagagtatataaaaagaagtggcggaaatatcgaaaatgatatttccgccaaaattattaagccacctgtggataatcgataactgcaatttcctgcattaattttttcgccatatcaacaatcaattcaaggcgttcagcaacttcgtctgtataatatttttctccacactgatcacattcaaggcatggaacatttttaattacaataatacaatttttataatttacgacgtgtgttgttgtgctattgacagttgtactatttttacaatacatacacatatccatcacctctttcttcgagtctttaaatcatcttcaaatttctttgtatctgggtaatatgccgttatgatatatatatttatattatcacacccggcaacaatatgcaaaattcgtccatttacgttatacccaaaaatcagacaacttggattaggataatcgtcagggtagtcttctataatttcaccggttgcaattccattttttacatcagcacgactgatatctctttcctgcattcgttgcagacaatgctgtgtccagagaatttttgattctgaacacaatttttgatatatttctaaattcattcgctccctccttaattttgttacaatctataaatattatacatcaattttattattgataacacattaagaatgtttacaggtataaaaatttcggatattataactataagattatttgaggtggtaaatttcgttgcaaccacgcaccctatgggttaaaagagatgccggagccgcgatgcctgccaaataatctctttcaactataaattatgaatgctctgttccgaatggatagggctttttattttgtaatgaagtcagcttagaaggaactacatgcaacgcaggggtgatttcatcagcagacagggtgtatataaaaactgtcgtttctcgttcaatgctggacttgcagacacacttccataaaaattatgatttattttcggttcagaatggtttccaccgtttgctgtggcgtctgattggaattatctagccaaaaaccaattttaggagttgtctgcatatttgatttctcctttacactacaagaaacaatttggaaatgctttctaaacagtaaagcttacttagagttatatccaccattcaggggtaagttctcccagtgtaacaattttcttcattaaaattatatttatagctttttccagaacattgtatattctttttttcccgtatcttcatcaactccttctgactggattaaaaacccttctctttgataaaaggctactgcccgtgaattttgttgatatacgttcaacgaaagagtatcatatttttcttttacataagtaagaagctgcctaccgattcctgtggaacggcagttttcgtcaacaaaaatcccggcgatatattcattcatcaaaccaataaatccttttatgttgccatctatatcacagacaaaaactttcgcttgcaataatgcttcctgtacctcgtcaaaatgtgaacgccagtattcctctggcacaaatgaatgtgcgtctatatttccagaaagccaaagtttcataacttgctttgtatctgatatttgaaattctctaatcataattttacctcctgcattttgctgaataccggatggaaacacatgcagtcaatataatcatgcacagaccggaaatgaagaaccaaacatttacccctactttttctgctatcgggctgctgaaaagcaagccaatcggcattgtaacagaagaaatcaaggtaagtaccgaaaatgccctccccattttttccggggatatggtttcctgcatataagcagtcaacggtataacaaatactgtccacacaggcaggtcaaaaaagaacagcagtcctgcataaatcagtgcaactgcacccattgccatatccgaaaaaatagagataaattttcggttataacgatcagccgcaattccagccagtgggctgaataaggtcattgggagataggcaacaagtcctgatattcccagcattaacggcgaagatgttttttcggcaagccaccaaatcagagcaaactgaacaccatgacttcccaacattgaaactgcctgtcccaatgctacaatcataaactgtgatttccatttttgtgttttttccatatcaaattgtcctctcattttcaaaataatttttcaaacaggggacaatatcaagtgtgataatccccttattatgctgcttccgacatcaagccacctcccttcaaaagattttgatttctgtttttataacatggcttccagatatttttttaatccgtcacgatatttttttgtaagcgtcagatattgctgttgttcctccgccgtccattcattccagattttattctcaatctcatgcaaaggcattattttttctgctgaaaatttctttcccttttccgttagacagagaatggtatttctacctttcccttgttccagatagacaatttcctctttttctaatttgcgaatggctgaattgatcgtctgacggctgatacctgtaagcttactgatttcactttgcaggcattgtccgcctttctcacaaaggacatacagaatattttgaacgctatctgaaatacccatttttacagccgcttcgtggtataaagcattgatttctcctgctaaataggtatattgtcctgtttctaaatagtgcaaaatgttcctcctcctttttgtatgtctgatttcgtacattcttattatatccgatttcgtacataagtcaatagttttattttgattgagcaatgtggctgctatatgtttcagcgattggacaagtgacgcactaaggggtgacagcactttctgctgtcaccccttgacttatcgaccagcaaggacagtagggactgtcaacggtgggcgtaccccagcacttgccacctactgacctgaccggcttttctatttattcagatatatctacattccacacgctttttataaatcggcacaacacagaacaaagtttatcctccgctgatactgtgtagttccttataaactataactttacatactccatatataacaaattatcaacaccactttgtttactatttttcatttttattcttgtaatttccttaaagccaagttttttgtataatgcgacagcttttgaattggtatcggctacttccagtacaaacgatgtatggggatcatgctcaaaaatatattgaataattttagaggcaacaccgcatctttgatggtttgagctggttgctacaaattcgattggctgcatatcgcttgtaatagtaaatgggtacttcttatcttcaaactcttttcgtaaaactttgtaagcaaaaaatcccataaagaagccaagatgttgttgaagctgttttctattcaaagaaatatttttaaccctgtcattactgatagaggcaaaaccagccacccgttcatctatgattgcaatataaaatgcatcgagattaaacatatgagcaaatgcttttttcaggacctctttgtctttagaaaagaatttaatccacttataaaagccatccacaaagatactgctgatttcatttctaatgtgattgctgcttacttccccggcacaaattactttcatttttcattcccatcctatcatattctattacaccaatttattttggtgtttccattgtaacctatcttttacggtatttcatcattaacatacaactgataacaaaaaatagaattcctgatccaataactacggtaagcatcataggaaaagtgaatctaatagttccaaacatataaatgatgccattttcagccacataaatttgttctatttcctgtgccgtcataaagcttccttttacagactggtctacaacattcccaaaagttgatgataaggcgtcttttgtcataattttccgcatcatcgtagctccatgatgtgcaggaatcaatgcaaacagcttttgaatattcgcaggaaacattccaatcggtaaaaaagctccggtgataaagccaacgaatgcggacatgattccggtaaatgtactgtaaatttgagcttttttaatcaatatcgctaccacaaacaaaatgcttgtcgttgaaaatgtattgattatgattaagctaatcatttgaaaagttgcttgtgcagatagccacttcccaccatttatcacaataaaaccttctgaaataaacaggcagagtgtattcaatacagtgccgacaaggaacggtgcaagccaatatctggcagccaatttactgcgtgagatagaaccggcaagaaaactgtccagcctgtttgtgctgctgtcctcgaccatgattgtgagcacatttaagggaatcaagatacaattaatcattaaaatgcctgccatagcagttgaatccactaaccagcggatgcttgaaaaattcatacctgtaacttctgcatatacctctgtcattccctgtgccagatagtcacctaaaaacagactgatcaatacaaaaaacatcagcatatatacaaatgagaacaaaacagacaatggatttctgagatacagtttcatcattcgttttgtcacaattcctatttctcgcatagttccacctccgtatgcgttgttactgctaaaaagacatcatccattgttccttttataagttcaaaatccttaaaatctttgatattctctaaaaccatcaaagcttcctggctgctgttaacagatattaggagatgatctgtttttaatttggggagatagcccatgactctaagctgatctgcacctttatcaagataatcaaaccataatttgagtgaatcttttccataccggcttttcaaagcatccggagttccttctgcctggatactgcctttttcaagaatcacaacatggtcggcagcagcggcttcttccatatagtgagtcgtaagaaaaacggtcattccatatttttcctgcatattccgaatcaagctccaaatagcagttctggtttgcggatcaagtcctgttgttggttcatccaatatcagaatttccggtttatgcaaaactgcctgtgcaatttcacattttcgtttctgaccaccagaaagttttccaaatggacgcttccagatgtcaaacaaatcaaagttctcttttaattccttgatacaagtattgatttctacgccacataatccacgaagctgtgcccgtattgtcagattttctttaaccgtcagcaaatcatccagtacattattttgaaaaacaatcccaagacagcttcttattttttctgcttcgcaatccatatcgaatcctgatacaataatttttccggaagtctttgtaagaagggaacagatcatattgattgttgtggattttcccgcaccgttagttccgagaaatgcaaacagttctccttttttcacctgaaaactgatgtgatttactgccgtaaaatcaccatagcattttgacaaattttctatttcgatgatatttttcattttgtcaccaacctttccaacggcattctactacatgacgttacgtaattagcaatacctttttgcaaaaaatatccgaggtatttctacctcggataaaatggagttgtatttacttatgctgatgatagaactgtatggcttcctctaaaaacggctctgctttctcaatcaattctttttcagccggattccatgtcatacgattatcgtctactgcaagaaaagcctgctcatgttccgtattaccaccagtcactttttttaatcatctgatcccattccgttgccaatttctgcgcaataagctctttgggatcaatttttgcttcatagaaagctgccgctttgatagataagcgtttccatgtgttataaaattcaacgacatcttcaaatgactgaaaatgttctgaaaaaactttcatttgagtatctgaaaattcgtaatctgcccacatagaaatatctactttttctaaagactgcataaatgtagcaagtaatgcccaaggcggaattttcccggcttcaatgatttcctgacttgcttcaagcgctgcaatgctgttttgtatggaatcaatctgattgtatagcatgatcttctgcgaagataatagttccgtcgctttcttttcagctgtgatatttggaattttttctttaatctgctctaaggagaaacccagtccacgataaaaaacaatatgctcaagctttatcagatcatcttcagtataatatcttcgtcctccctctgttcgtcctgatgctggaagaacccctatattgtcgtaatgttgtaatgtgcgaatggtaagcccggaaattttggcagcttctccggtgctaaactgtttttctttcatgttcatcacctctaagccagtatagcatataacataacgtaatgtgaagataggtatacctttttttcattcaaagcccatcataacatttgggtgaaaatccccttgacaattttattgatatactttgcatgaaagttttttattaaagacgcatgtaggaaatcaagagcaagatccaccccggtattaccatatccccattctgccatataagtaatatttcggaattttatcttgctggggaactgtcgcctccccatacccatttttttattggctacaccggcggtgtacgcaacaaaatattataattaacataattctattttgaggcattcagcaagtaactggatgtctttttctttttgaaaatacacatggtgatgcgaacaaattcttttgtaagccaatgatataagcaagggtatggggaattgtcactctccatcaagagaacacccataaggtgaatggaggcggaaacgcgataacgttaaacatgggtggatcttgctcttgtaatattttttctctctgtaccctgtaaaatgagctttttccctttcgttatatagggagatataaaaaggggctgtcgggaaatagatagttccaaacaggggcagatttgactcgcataagtcaaatctgcccctgaaacttttccgtaaaaagagaaaaagatggctaacgacaaccatctcctctccgttccatgttataatggaactatgctaaaacaagattattataacgaattttttgaattagggcaacagaaaattaacttcagtttcttcgaattgtgtttacctgacgacgatccagtctataccctgaaaaaagtgatggaggatttagatttttctggcttgttagccaattgttcaaataaggggagaaccgggtttaatccaattatgatgtatgctgtcgttacttacgcaaacatgcgaggagttagagctgttgaccgtattgtggagttatgtgaaagagaccttgcgtttatctggcttaccaaaggacagaaaccaaaaagagatgcattctatgaatttaagaataaaaaactaacggctgatgtattagatgaattaaactatcagtttctccgccgtctgcaaaaagaaggactgattaccctaaagtcgctttttattgatgggactaaaatagaagcaaatgcaaaccgctatacgtttgtctggagaggaacgctcaattatcatcttgcaggattgctggataccattgattcgttgtatcagaaatataacgttctgatcgacgaaaatgagtatagtatcaaatatgacattcctcatgctcatatgtttgtaattgaaggaatagagaaagtaaaagatgtcattgaaaagaaccggaaacgaaaactgacaaaacataaaaagttatccaataataccatcatcgaaattgacaattgttctccgttggagattgtgaaactccagaaaaatcttcttcagattgtagagcaggaacagatcgagtttgtttatggaaaaggaaagaaaaaccggaaatccagcaattatatgaggaactggaagcctgcggtgaacgcctgatgggatacaaagaatgctttgagatcatgggaagagacaggaacagttattccaagacagatttagaagctacctttatgagaatgaaagaagaccatatgctaaatggacaactaaaagcagcatataacattcagatagcagtagagaattatttcattgttcaggtatatgtaagtaatgaccggacagattataatacattgattcctgtgttagaaaagcacaaaaatgcatttggagaaattttggaagaagtaactgccgacagtggttattgcagtgaaaagaatcttctgtacttaaaggatcataaaatcaccagttatatcaaactgcaggatcatgaaaaacggaaaacacgtgcgtacacagaagatattgggaagtattacaacatgaaaacgcagatctttgaggatgaactttattacgtctgtcatgatggaagagaacttcatcatatcaggactgagaaaaaagaacagtctggttatacacaaacatttgaggtgtatggatgtgcagattgtagtggctgtggacataaagcaaaatgtctctataaatataatgccgaaaaagatgcagagaaaaataaagtcatgaagatcaatgaacaatgggaagttttaaaagaagaatcccatgcaaatatccagagcgagaaggggattttgaaccggcagatccgttccattcagacggaaggacattttggagacatcaaagaaaatgacggttttcgccgttttaattaccggacagcagaaaaagtatacaaagaattcatgctgtatgcgattggaagaaatataaataaataccatcgttttcttcatgatgagatcaagaaatttgaaggaaaaaccgaagaaaagactgcttagaaaaaggatgctttcaaaaatgcagtcaaggggtttttgcgtcctaaaatacatacagaaaagaaaaaaatacgaatctcctaaagaagttcaagtattaaaaatactgatttctatgggagattcgtattttaagatttagagcctaaaaatcggtattaaccgatagcccctttgggaaagccggcatccgtctccttaatttttcagaaaggtaaaagaaaatatgaaatttgaatatatgatggaaacggaaaagatacttccccattatcagttccctaaatttttgttagagctaccactctctcaaaatgcaaaattactttatatgctgttatatgacagagccagaatttcacagaaaaaccattggctcaacgaagacggatatgtatatttcgtctttccgattacagaaatttctttgaaatggggaaaatgttgtacttctgtaaaagctgccatgaaggaattagatgagtatggattgttgattcgcagttccggaggattttcaaaaccaaatcatttatatatgcgaatcccctgtatagagttgatttctgaaccggatgtaaagcagacagacgaaaatacagcttccattgggatgaaaagctgtccttcattcggtcggaaaatagcctcttctatgatcggaaatgtgccacctagtaaagtaaaagaaaaatataattttagtaataagattggagtaaattacgaatatgaggagggcgacagtctatgataaagcaggaacacacatatttaggtgcagatggattagcatattgcatggtttgtggagaacctgtagaggcatatttcccttcagacagtattcttggtatgaaaaaacattttagacaatgtgcatgtatccgtcaaaaacgtgaagcagaagaaaaggcatataaagaaagagaacattgcgaattagtggaaagaaatagaaaaatctgttttgaagaaccacgaatgtatgattggaattttgaactggcagaaaagactactaccatcgagaaggccaaagaatacacagcaaactggaatgatatgaagaaaaatcatattggttttctcttgtggggaccaataggaaccggaaagagttacatagccggttgcattgccaacgcacttttgaatcgggaaattactgtgaagatgacaaattttaatacaattattgatgatatgtttccattagaggataaaacagaatatatcaatgccttggcacgatatgaacttttaattttggatgatcttggcacagaacgaagttctgagtatgctcttggaattgtgttcagtgtaattgaccgaagatatcgctccggcagaccattaatcgtaactaccaatcttccgataaaacaattaaaagaagaaacgaacatagaaaagaaacgaatttatgatcgtattttagaaatgtgtgttccgttatatgtcggcggttctagctatcggagtgatattgcccatgaaaaaatggggaaaatgaaaacctttttcgctactgctgaatcaagtcaggctgaaaatattatagagcagacaggcacaaaaacaatctgatgtttatatcttagtatagacatcagaaatagaaagagtgtgatagctctgcagaaacctacatattacttgtggcgaacagattatacatcttcagaagactttgaggcagataaggagaaatataggaaaataggttttcgggttgtcacgtttgcggatgggcagccggataaaaatatacataatggaataaaagcgttgattcgaaaccatataaaagaaatcaatcagtaatttctatgggcgggagacattctctcgcccatattattactattcacagtaatataattcattgtaaaatcatatgagaatccgtttacgaaaaagatttttcaatgtataattatattacattattctataaataatatttcagaaaggatgaggacatgaatgctggatatgtgcgtctttcaagagatgacgataagcgaaattatgtttctatagaaaatcagaagttaattatcaatcagtatgcatctgaccatggaatggttattgaccgatggtatgaagatgacggagtatcaggttatatttttgacagaccaggatttcaacagatgatggctgatttggataaagatattgatatcgtatatgtgaaagatttctcgcgtcttggcagacataatgcgaaggttcttttgcttttggatgaatttcaggaacggggaaaacatctcattgtcattgatgataattacgattctttcgattccagcgacgacaccattggaattaaaacatggttcaatgagcgttatgtaaaagataccagtaagaaaatcaaaagagcgattggagctagacaaaaagaaggtacgcttatgacaaaaccaccttttggatattgtcgggatacgaaagacaaaagtatcatcaagatcgttcccaaagaagctgaatttgtcaaaatggtttacgatctttatatatccggttccggttatcgtaaaatagcaaattatttgactgatcagggcattccaacgccatctatggtacagcgagaacgagaaattgaagaaggtcgcataagcaaaaagaaagttgcaaccgtttggtctgacagcatggtaaaagagttattagataatgatttttacattggaacttttcgtttaagaaaacgtgccagaaatacagtacatggaaaggataaacgtgttccaaaagaagaacagtgtatttttgaagatcatcatccggcagttattgataaagccactttttctcttgtgcaggaattaaaagaaaagcgtaaccgaacaaattatcgtggaagcaggggggaatggatcggttcagaaattcccaatccttttggaagctgtttgttttgtaaagattgtggaagtcgcttgacaccgattaagcgtcaaacttccagcagagaaagaaaatattatatttgtactacctataatacgaaaggcaggcggtattgcgagaaagcgcatctgattgaggaaaatgatttgatggaggatgtgctgaattatattaaactatgtagagaagcgctttgtgaagtgatttccacgtatgatatgagggactttgaggcagaaaagaaaacgctggcagaaaaacgacaggacattcaggaagaaattcaaaaccgaaaaaatcaactgaaggtacttctaacacaaaaaataaaagatttatccatagcatctgaaaataaggatttgatccatgaaacttatgactctttacaaaaagatttattggctcagattcatggtttggagatgcaggaaaaagaactgaacgaaactgccatagaaacaccgaatgtaaaagacaaattgagaaatgcgttggatgtagttgataaaatcattgcaggtggaactcttgaccgaagagatattgaattgttgattgaaagaattgacgtagataaagagggcatgccggaaatcactttaaaatatggtttgtctgatttaatcaattacagtcctgctgatgaaatgaatcgccgggaaaatatggtaatcgctcttgtaatgaagctgattatagaagatgaacgtggatatacatctgcaaaatacttgtcagaacatatgacagcattgggatttaagaaaacgaaacaaagtatcttgccttatatccatctgatgaaagaattggggattctggaagatacagataatccgctaaaaccttataatattgtgaaaacaaaagaagagattatggagttgatacatcaatatttgccagatttatctgctcaaatgacttctgaacaattatcgaacaattatttacattattataccggcgacaggtggtatgccggagatggtatttgagtatattctccgccagaatggcattgaccctgccaaagatctagagatcaatcagaatattgactttggctctactgcagcagctttttctgaggatgattcagatttcactgtagaatttgaacctcatgctacttctctggaaactggtggaaaaggacacgtggtagcttctctcggaactgacagcggctatgttccatacactgcgttctgtgccaaacaaagctatctcaaaaagaatcctgagaccattcaaaaatttacaaatgcccttcaaaaaggaatgaattttgtgcgtgctcactctccaaaagaaatcgccgaagtcatcgctccccaattcaaagaaacggatctcgatacgattacagcaatcgtaacaagatactatgatcaggatacctggaaaaacaatctcgtttttgaggaagaaagctttgaacttcttcaagatatcctggaagattccggcgaactaaaaacccgtgttccttacaaagatcttgtcacaacaacttttgcggaaaaggcaaaaaatttttagggtatttcattctctatttctttgaaaatatgccacaaaatcattttttatagaatttaattccctatttttcttgacatctctcttctcataaaatagtataaatttatatacgttgggttcaaaggcagctgctatttgtccatttactgacaaacagcgcagtctctgaaccctgctatttttcttataacatccatttttcggataaataactatttttaatatctgctttttatgctgaacattttaaaggagagatgaaaatcaaatgagcgcttatgaaagtatttctcttatggagaatcttgtgatcacagaaatctactcaatccattattttgaatatacaaaagattttgtctacgaaggggagtcccacgatttctgggaactgctctgtgtagacaatggagtaattgaagtcaccgccggagatcagaatcttgtcctggagaaaggtgagatgatttttcataaaccaaatgaattccatgcgctgagagcaaacgggcagatcgcaccaaacctaatcgttatttcttttgattgtgatgcttcctgcatggattttttccgtgatcggattgtcacaatcaatgctactgaaggattttatcttggtcagattctcacagaagcaaagaaaacattctatacacctttgaacaatccgtatatatgcaaactagaacgttatccacacactgcattcggaagtgaacaaatcatcaagatttcattggaatctatgctgatcagcctgtttcgtcgatattcagaagaagaacccctcttcgcctatgagcaggccgaacatccgatgttacaccgcaaccacgatatttttctcagtcaggtaatccaatatttaaatcaacatatctcggagcatctgactgtcgcacagatctgcaaagataatatgattggacgttcccacctgcaaaatatttttcataaaaaaaaaggatgtggtgtcatggaatacttttcctggctaaaaatagaagcagcgaaaaagctgatccgcgagaaccgctacaactattcgcagattgcaaacctgctcggttactcatcttatcagtatttttcgctgcaatttaaaaattatacacgaatgaccccttcccagtatcaccgttccattaaatctttttctgagtagctgtgcggattgccgcatttatccgctctctgcaatcagtcagataagaaatacttctcggatatttcttaaacgtcacttcttcgtcctgtgtccgttctatacatttcagaactgtatttcggtctgtcagaccctccaacagatacatggctctcagatcattcattgcctcatccatcagcatcagacggatagattcttcaggttttctgtctgcccctggatatacaaggaacggatcgcccgatggaaatgctccagatgcatccgtacagcggtatggatcaatcggatagagcgatttctctgaattatagaagttatatccccagtgaaggaatccatccaactgatatttgtacatctgcacccctaagattcttgtcctatatccaggctgtacaatgaaacgatttgatacatcttcatactgtccagtacagtaatatccccataacttttccggtcggtcttctaaaaatggttccatatgattcaatgcacataccggctggctgaccagtccttccttatagaaatcataatcagacagcgcatcaaatacgatgcatccttctaaatcctctgctacaacctgctttgctgcacgataagaatcaatctgtgtcatctggggttcatcagaaatatggaaatatactttctcgcgaatcccaagtctgtccatctcttctttgagtgccgtcagaaattgatgcaggaaatttttatacgcctctccagaggcatccgtatcccatccaaataacttcaccaattccccatctttctctcctacaatcttcggcgctgcaactgctccccactgggagaacaaatgagaaatctcataatattctattccacatctctggcacatgctcacccacttttcaaaatttgcaaatccaaatgtgtattggtttccctctgcctttacgtcaacaagctgtaccgtacgtctttctcctcccactgccgtatcaagcggcggagtaaatactggtgtcagaagcatgttgcagtttcgttttactgctgtcttcacaaaattttctacaacttcccaatattcatctgaaaatacttccagttgatagtagtctgcaagacagtctgtatgaaaccattctgtacgcggaactggaagttttggaagcacctggtcaatcacttcacagaacacttccagtttgccgataagatcttctccatgcgttagacgaatctccaacggatattcccccgcctggatgtcttcaggaatctctacatcgatccacaaacttctccattgtccgctcaccataggaaatccaagttcaggaatcttggtcaaaagatccggatatagccccggtgctgtagtaaggtaatcttcatccctgctcatatgacatggatattcacatggtacaagctgtacaagacggacatccacttgatttctaattggagatatcacttccacctttcctctctcttttccatttcccgcccagtaataagcaatctgaaaagatacggtttcccctttcaatgcagtcagtcttgcaaggtttccctctcctgatggttccttatctgcaaacaccttttccattgcagataccattttaattctgaaatatttcattccttttcctctctttctgagcctcatcactctgaattttttcgtctattttatcctttcactccgctaagtgcaataccttctacaaactgcttctgcaaaaatgcatacaagataaacgggaagataaatgacacggttgctcccgccaaaataagcccataatttgtctgatactgtgtctttaacaatgacaatgcaacagtcaatgtgtacatagaagaatcggttgtggatacaagcggccacataaaatcattccatgaagtcacaaaagtaaatacgacaagtgacacaagaactggtttgatcagcggaattacgatattgataaagatcttgtattccgggcagccatccacctttgccgcctctaaaagttcatccggaacactttccataaactgccggatcaaaaatacaccaaacgcattcaagataatcactaccagcgcaaaatatgtgttgagaagccctaatttcttcataataataaataccggaatcatagtaacctgccctggaatcattagtgtgagcatatacactttaaaaagaaattcttttccccagaaatgttttttctcaaatccgtatgctgccatggaagcaatcacacagttgaaaaagcaggaacaaccgacaacgattacactattcattagcgagcggaaaaatccactctttccaaatacatgctcatagtttgtaaaatctgtaaaattcacatcgccccacgaaatcatcagtgtcgtagaatgcgtaaaggacatgatcagcatatacaaaaacggtgcaatgcagatcgccgcaaaaattaggatgaagaaaagtccgatgactccaagcggtgtccatgctttttgttttttcgtgtttgtagcactcatacctgccatactactttcccttcctttccttgaaaaacagattttctataacattaatgatcacgacgatcaagagtagcaacattgccatcgcacatgcatatcccattttgtactgtttaaatgccgcattgtaaattcccataacaagcgtgacagtagcacgtcccggacctcctccggtcattaggtatgcaaggtcaaatacctggaaagaccaaatgatcccaagtgtcactacaagataagtgatcggttttaacatcggcagtgtaatcttaaaaaactgttgaatggatgtcgctccatctacttttgctgcctcgtataaatcttttgagattcccataattcctgcataataaataacgagaaaatatccgacatttttccagactgcgacaatacatatactgatcagtgctgtctttgtactgccgagccaattaactgaatctagatgaaaaaaatttaagatgttgtttaacaacccaccctctgtatttaaaataatcctccagatggttcccgctgtaactgctgatgcaattaccggaataaacataacacttcttaaaaatccccctgtcttattctgcattttatatgcgagaaatgctgcaaaaactaatgaaagtatcgtctgtgccggcacagtcatcaatacatacaaaagtgtgtttttcgctgcatctgcaacataaccatcctgaaataccttttcataattttcaagtccgacaaacttcggcggggtcataatattgtagcttgtaaaactaaaatatcctgacataaaaatcggtataatacaaaaagccatgatcaaaataaaacttggcaatacatatataattccctgcaatgcttctttctttttcctggacacaggatcacttccttccttgtaaatcaatcgggagaacctttttagattctcccaatcggcttacgcttctaattgaattttctgataacagttctattttaaattcgtattataatactctgtcgtctgcttcagcacttcctccggtgtcatttctcccagcatcatagactgaagatttttatacagagtgtcataaagggaacttgcccctttaaatacaggaagtgacacaaagttgtcgccatagtcagagaataattctgcaaaacgctcatctccggaatacgtctcgtcctttgtaattggaggttgttcagatactgtcttatggaaatcagacatcacatccgcacttgtgatatacttcatcaattttgctgcaagttctttattctcgcatttttcaaacatcacaagcgaatccgctgcgacaaatgtctgtgctttctcaggaccttcgatcaacggctggaaatcccagttgactttatctccaactgtcagcgcattgctggatgcaagtactgccattgctgcttctccatttttaaacggctgcagtacatcgtcatttgatgtacaggagtctggaagtattccctgctctttcaagctatataaaaattttgttgcttccagtccttctttggaatcaattgtaagatttccttcttcatctacaatttctccacctgctccccaaaaatatggccagtaaatctcatttaaagatccatagtgaggatttccccaatcctgaagaaacggtgccacatttggattgctttctttgatttttttgcatgcactaaccagttcatcccaatttgttggtattttgtcaattcccgcttccttcaaaagatccatatttgcgacaagaattcttggatttccaacaacaaccggaagtgcatactgtccttcctgaatatttccaagttcataatacagataattttctttttcctcatctgtaaaatactcatcaatatctgtcagtgcccccatatcgatataatcataaaacatttccatatacatatatccaacatccggtccatcatccgaagttgttcctgtcagatatttctcctcataattatcccacggaatgatctccacctttacctcacaattattctcttttccgaatgcttccattttttctccccagaattcctcgtcggtcactttcgcatccgtcgctgcaaacgttggcatccaaagtgtgattttttcctttccccctgatttcttttcatctcctgaaccagaaccgcatccactaaatagtccaactgtcatcgctgccactgcaagcagtgcaattacctttttttgtttcataacttatttcctccttttgctaaattgttttgtgtaattcgctcatttatttatctcttaatcaaataatataacacttttgcacaattttcttcctataattgtccgtgttctgcatacttttgtccattttgtgaaactatcccttctctttctgttctgttttcttgggatctcaattctttattgcacaccagcagatttctatggtataatgagattcaaatgaaagctgaaagaaggtatctattatgttagtagctatcattggtatttctattcttgcagctgtcatcgctgcagttgtcacagcttcatttgccggcgtgctcgcagcagagcttgacgatgaagaataagaaatcattaaaaatggatgcagacctgccacttacagatccgcatccattttcatttatataaaagtcttgcacatttcatttgatacggatacctctcgatatcgggtgacgatctcaaacccaccttacggtgtctggctactccctcttatcttgattatgattctaatacgtttccccgctcttgtcaatctattttttcttttcacaaatcattttacaaatcttatcacaaaatgactatttctgctcagtttttgctccggaaacagtaaacccgtacttcacagttccattttcccataccgcttccaattcatataccgaattcacctctgcttctttcagttcgccttcacttccatccatcgtgacatcctgctctgtaaactctgccgcttcaccagagagtgtttccatgctccactttttcacagtgactttctccggtttccttgagaacataaatttcagactcttatcctccgcatcacagataatctccgggagtacacctgcctgatacttttccaaaatagacccttcttctgctttttgactttctgttgtcccgtcatcctctgtgtaactccagtcataggaaacaggggaaatgcttgtcgatacgattgcaagcttctgataattttcaatactgagcgttggtatttcagaaggatctggcgcctggtaaaatgcatcgatcaacggctggtatttctcagcaattttctgatctcccttttctgtacgaatcatctttgtcacacctgcatactgtggcggaagactctgtgtaactgccccatttccataaatttctattgtatctccggcttgcagattttctttggaaatcttttctccatttttgtcaaataactttccatctggaatttctgcttcaaacaatgtttcattttttatatctgcaaaaatgtaaaattcctgttcttccccataagtgagataaactccttctacagtcggtatttcctctttttctttagttgtattttccttttttccacaacctgtacctaaaatcagtactgatgcgagaagcactcctatcattctgctttttttcttcatgtctaacgcctcctctttctactatatttttattatctttcccattctttttgaatgtatcagcattataccaaaagctcgcagaaaaaaacagtgcagaaccttctttttaagattttgcaccgcttttcttaagattttacaaagaattctattttccttttcggcaatctatttcccttctgtatctttcaatttacagattttttctttcaaatgttctgctgctctctttggatcatcggccttcatgatcgcagatacgaccgccacaccatccatcttgcatcctcttaaaatctcaagattctctgcattcaatccaccgattgccgtcactggaatcggcacagtttcacagattgctttcaatgtctccggctttgtgagaatcgtgatcacctttgtcgttgtcgggtaaattgcacccactccgaggtaatctgccccttcttcccacgctttttttgcggcctccacagtctttgctgtagctccgataattttctctggtccaagcagttttctagccacagctaccggaagatcactggctcctacatgaacccctgctgcatcacatgcaatcgccacatccaccctgtcatcaataatcagcggaactccatagcgatcggtaatcttctttacaagaattgccttctcaagatattcttttccgcctgcctctttttctcgcagctgtaccagagtcacacctcctttacatgcttcctccacagtccgaagcaatgactctgtcgtatgataagtactgtctgtcaccaaatataaggtaagatctacctgatttcctgttctcatctgtccacctcttctattttcccattttttccttgacagaatctgtcactttttctattcaaaattctgcttgattttttcccgcagtcgaagtcgattcctaatttcttcttcctgcagatcatatagcgcatctaaaaatgctatctggaaacttcccggtcctctgctgttttctgctcctaattcccctgcgattcccataactgctgctgctgccagcactgcctgtcctctgctttctgcggcttccgtaagataagtcccgcacaatgccccaagcatacagccggttcctgtgattgttccaagcatagcatctccatttgtcagacagtagcaatggggtccttctatgatcagatcctcctgaccggtcacgagaagaactgaccgatactcctccgacagcctgtaaaatgcaggtaagatttccttctcattttcctctgaaaaccgatctctttctcctgcgtccactccggttccatatgtggaaagccctgccagtttccgcatctctgacatatttccttttagtacggtcggacttccaatctctagtagttctttggcataatgcaatcgaagactgctgcactggatcccaacaagatccaaaacagtcggaacacgattctttagtgcctcctgaaatgctttcttcatagaactcattctcacatcggtaatatttccaagatttaaaacaagcacctgcgctgtccttacgatttcttctacctcctgtggatgctctgccatgatcggccgaccaccggctgccagtacaatatttgcactgtcatggatggcaatcggattcgtgatacaatgtacaagcggtctatgctgcctgatctgctcccccagtactgcgatcttcgccgctatttttcttaacatttcctttgtcatatactttcgctccaagactccattgaatttttgcaagcactccacttctgctgagctgatttaacagaagccatgccactgctcctcccatacaagttgcaccaagaaacattggtgtatagaaaaatgcattcagcccatctcttcccatcagaaatgccatgaccggataggatacaagtgatccgatgattcctgttccgaaaatctccccaaacacagcacagaaaatctttccgtgagatgcacggtaaaaaacaccggataaaaatgctccaaatactgctccggtcagagcaagcggcgggattcccatgaacatcatccggataaccccgatcatcgtcgcacagagcagcgaataccatggtcctaaaaacactgcacaaacaatgttgacaagatgtgccgtaggacacattccctccacgcgcaaaatcggtgaaatgacaactcccacagctacgaacatcgaaagcattaccattcggttcgtgttcattttttgttttttcatgatgtgattcctctctttcttttgttggaacacacctgacaatcatgcctgaaaattttcccagaaaggacatcagtccttctgaacatttctcttaatacactccttcgacccgaaaagcatgatccatcggaccacttccttttccaagatccagcattgcctccaatgccccggaaatgtaattcttcgcattttctacactttcttccatcgaaaagccttttgcaaggttggaagcaatcgcactggaaagcgtacatccagttccatgggtattcggattctcaatccttcttccacggaaccatcgaaatgttccattttgatataataggtcattggcatcgttcttctgatgtccgcccttacacaggacagcacatccataggcctcactgatctttcgtgcagctgcgatcatatcttcctccgtgaagatttccatctctgcaagcacttctgcctctggaatattcggagttagaagatctgccatcggaagtaacgtcctttttagtgtcgcaatcgccgtatcttccattaattttgcgccgcttgtcgccaccatcaccggatctacgacaatcttttttgcattgtactttttcagattccgggcaatgacttccatcagttctgccgatgataccatacctattttcactgcatccggataaatatcagtaaaaatacactgcaattcttcctccagaaatttaggagttacctccataatatctattacgccggtcgtattttgtgcagtcaatgcggtgatagcactcatcccaaatacatggtgtgccatcatggtcttgatatctgcctgaatgccggcgcctccgctggaatcgcttccagcgattgttaatgctgttctcattttgttctccttttgcattaattttatatagcggcagaaagtggtgcccccggcctgccgcttcttgggttcccgatagctattccggcgacatccgttctctctgtcgcggtacgatctgcacggaatattctaattttacaggattctaaagaatttctgtaacaaaaaagctgtgataatccgcgcgggtactatcacagcataaacttctaccgggtattttcctacgttggcattatccaaatcaggttatgggtctaagcatacagcttactctcagcctgcttttcgcaagctccccttgttcttttccaagttttattgtagcacaattttacagcaatgcaagacttttctgattttcaattcgctctgcaagatcatttaaatatacccaccgctccatcttctcttccaatgcagcttctgcagcttctttctgttcggtgatttccgaaagcttcgctgaatttgtagcatattgcatcatctgctcatccaactcctcgattttctgctccaaagatgctatctcatcatcgatcgtctcatattctttttgttctttataagtaaatttcaacttttccggagcatcctttttccaattctttcgatccgcctttttctttgcggattcctcagattctctgacaacagtcccattcttgcgctctttcgcttcaagataatccgtgtaaccaccttcgtactgtacaagctttccgccagcctcaaatgcaaagatacgatctgcaatattatcaaggaaataccgatcatgagatactgtgatcacaattcccaaaaaagagtctagatagtcctcaaggatggtcagcgttggaatatcaagatcattcgtcggctcatcgagaatcaatacatttggagcatccatcaatacttttaaaagatacaaccttctcctctcccctccggacagctttccgatcggggtatactgcattgcaggagtaaataagaatcgctccaacatctgtgaagctgtaattctgccatcttttgtcggaacatattctgccacatctttgatataatcgatcacgcgctgattctcatccatctccgtgacttcctgcgcgaaatatccaatcttgacggtatcgccaatctccaccgttccctgatccggttcttctttcccggtaatgatcttcatcaatgtagattttccacatccgtttgatccaatgatcccaagccgctgatttttcagtacaatatactcaaaatcatcgatcagctttttctgcccataactcttagaaatatggtgcagctcgatcgtcttctttcccatcctcgtttccacagaatccatctcaacctcagcatctctgaccggagcttttccattcttcagtgcctcaagccgctccaaccttgctctctgcttcgttgtacgggcacggcatcctctcttggcccactccagttccatcctgagaacgctctgtcttttccgctcagaggcaagttccatctcctctctttgtgctttcaattccagaaactgtgaataatttgccgtgtaggaatataatttcccatggtcgatctctaaaatcttatttgtcacccgatccagaaaatagcggtcatgtgtgaccatgatgatcgcacctttccactggttcagatactcttccagccagactgccatctcattgtcaatatggttcgtcggctcgtcaagaatcaacacatctgccggattgacaagtgtccgtgcaagtgctacgcgctttttctgacctccggacaaatgatcaatctcttcgtgatgatctgtaatcccgaggcggttcaacgcattctttgcttcactctctcttccccagtctgctccatcggcaccgtctgccacataggaaagaactgttgcatgctccgggaacttcggcgactgcggaagataggtgacacgaagtcccttttgaaaaatcacttgtccctgatccggctcttccagccctgcaattattttcagaagtgttgtcttgccagttccattgattccgataattccaattttatctccctgatgaatcccacaggaaatatcatcaaacacttgcttctctccaaacactttactgatatgctctatattaattatgttcatctgcaattctcctcatctttatcatctttcccattatatcgattccaatagattttctcaagacagactggggaagaatttcagaagtttttctttcctctatatattattctactcgcaacatccggtaacccaccccgatatgtgtctggatatactggggcatatccggttcgctctcgatcttcttgcggagtgtcgccatatatacacgcagcgatgccacgtcgttctcccagcttctgccccatatctcctgcgtaatataagtatgtgtcaacacctttccgacatgttttgatagcaggcataataatttatattcaatcggtgtcaagtgtaattcctttccatccatataagcacatcccgcgccgtagtccagcatcagttttccgtttgtgaaggtggacttttcttcctgggttcccccttgcatgattgcaagtcttctctgtgtcacccgcagccttgcaagcaattcttctacggaaaatggtttcgtcagataatcgtctgcccccgcatccagtgccacaatcttatcattatcctcacttctggcactgatcacaatgatcggcatattagaccaagagcgaatctttcggatgatctctactccatccatatccggcaatcccagatccaaaagcacaatatccggattatacgaggatgcttccaaaatcgctgtctgtccatttgcagctgtctgatggcggtaaccgtgtgcctttaatgttgtcgtgatcagatttcgtacagatgtatcatcctcgacaactaaaattaataatttattcattcaaatgtacctcctctgcaggtaatgtaaatgtgaaaatgcatccgtggggatgattgtcttctacccggatgcttccttcgtgcgcctctataatcgaacgacacagcgacaacccaagtcccagactgcggcgactgtccacaatcttatgtgttccagtgtaaaacatttcaaaaatgtgttcttttgcctcagcactaattcctggtccattatcactgacagacacttccaccatattttcttttttctgtgaggcaacttctatgacagatcccgccggcgtgtatttcagcgcattgtcaatcagattgataattacctgaagaatcaatctgacatccatctttgccatgagaaattcatcatttttctttaaatggatctgatattctgcacttttccttggcagatggcgtatggattccgcagtcacttcatcgatcagctccaccgacatcttcaagttcagtctgccatcttctatccttgtcacagacaaaagattttccacaagattgatcagccacatggagtcgtcataaatatctccatataagcgaagtttcgtttctttgtcaaatttatcttcattcgataaaagattgctcgcatttcctgatattacagtcaatggagtccgcagatcatgagagatcgcacgcaaaagatttgctctaagctgctcattctgagccataacagcagcctcctctttctctcggatactctgctcattttccagcgcaagcgcacattctccgagaattgaaagcacgatacttttctcaaaagtatccatcggactgtttccaagtgcaatcccgatcactccataaaccatgttattgacacgaacagccagatataaacatttggcatttgggaacatctttgttgttgcccctgcatgacgattgttcttcattacccatagacaggcctgccgctcctcttcggtcgtatacgattcttgttcctcttcttcaccgcaataataaacatgcggagccgaaagagatgctttctcgacctcatagactacaatatttcgattcagaagcttgatcagctgcatggctgtgacttcaagaatatcttttttgtcccgctcctgttgcagcagctgattcatatcaaataaaatctgtgtccgaaatgcagtctgtgccgcctctctcgcattatttttcagctttaccgtcagagagctcgtaatcaatgctgataaaaacataattccaaatgtaataaaatatcctgtatcatatgctttcagcgtatatttcggagcggtaaacaaaaaattaaagatcagcacactgaacaccgagagcgtcaagctgtaaatcctacttgctgtaatcgccgctgtgacaagcacccctaaaatatagactgtcacaatattagactggcggattcccaattcctcaaacagaaggctaagtactgttgttacagttgctacaactactgtctttacccagtctgagagcatatagtacttctgttcctgctttacctttttctcatggtagagagaaatacttctctccgcccatcctttttccctgctcctgctctctgtctcactttcttctgcgagcatatcttctgtttcccactctcgcagatatttctcctgatttttttcaaacaaactgtcaattttcttcatgcaccagaagcctatgattcccgctgataaaaatacaatgatcatccatatattctgcatcctgtgaccgcccctctgactctgctatattttcttatctattccattaaatatggaaacacttctgtacatttttattttttccaagaacaagaagtgtctcatcttctttgaaacaataatcggaatgaatctccggattaatctgatcatctttttttactgcaagaagtgtcacattatatttcctgcgaatatctaactgatgaatggtctttcccacccatgcctttggtgtctccgtctcataaatagagtaatccggtgtcaattcaatataatcaaaaatgtgatcagatgtatagcggattgccgtccatgctgcaagctgcttttccggatacactacatggtccgccccatttctcaacaaaaacttcgcatgaacatctcttgccgcacgcgctacaacttttctggctcccaaatcttttaaaagacttgtcgtttccaaagaactctggaatgcatctccgattgcaacgatacagacatcaaaatttcgtactcccaaagaacgtacgaatgcctcctctgtgctgtccccaatctgtgcacttgtcaaatatggaagtgcatcttccactctcttttcgtttttatctaccgccaaaacttgatgattcatttcatttaattttctggcaacatgtctcccaaaacgtcctaatccgattaataatactgatttcatatctcttctcctaacctatcgttattttttcctgtggtaattttgatttcgtaaaacggtgtccagatacaaccgcaaaaatcagtgtcaacccaccgacccttccccagaacatgagaaggattaaaatcatgtgggaaaacagactcagctgaggtgttaaaccaagggacaacccaacggtcccaattgccgacgatgtctcaaacagcgctcccatgagtggaacctgatcgacacaactgatcacgactccccccagaagaaacaaggacatatacaaaaacaaaatggtcgctgcattcttcactgtctctgacggaattcttcttccgaaacactgtacatcttctttcctgaaaaaaactgcaaaagaagtaagaagcaacacagcaagtgtcgtcgtcttaaatccacccgccgtcgatcccggtgaaccgccgatcaacatcagcaagatcatgatcaactggcttggctcactcatacggttcagatcaaccgtattaaaccctgccgttcttggcgttacagactgaaatgcagacgcaagaatcctctctttttcgctaaggtccgtccactcagttcttccaaactcataaaaataaaaatacagtgccggaagcaaaattaaaagaattgtcacagtcaaaataaccttactttgcagacgatacttgtgaaaatgtagtctgtggtgccaaatatcatcccaagtcaaaaatccaattccaccaatcacaatcaacgctatgattgcaaggttgattgtagtatttccgttaaatccggtcagagaggagaacggttggttcacccccatcaagtcaaaacctgcattgcaaaacgcagataccgaatgaaatactgcataccacactcctttcttcatcccaaattcttcacagaatacaggcgccatgaaaattgctccgagaagctcgattgccagcatcgcccgcagaataaatccggtcagtcttacaattcctcctacctgtgtcgcggaaattgattcctgcatcgtacttctctgcatcagaccgatctttctccccgaaagaattgcaatggcagaagctgctgtgatcactcccattcctccgatttggatcaacaccataatgatcagctgtccctgcatcgaccagtaactcgcagtgtcatgaatcaccaatccggtcacacaaattgctgacgttgatgtaaataatgcatccgaaaatgaagtccctaccttttctactgtagaggatggaagcatcagcagaagacaacccatcagatttacaagaataaatccaaaaataatcatctgcggagaagaaaaatgtaattttttttgtatcacgtccataaagtatctcctgaaaaaagttatccgattcttcttcgatctcggtattctttatattactttaacactcattaacgccgcataaagaaaaatatgccagtattaaaatcgtataaagattttaatactatttttattatttgtcattctttttcttcgtttcttctttccatccgtccactcaccagattgattctcgcaaacactaatgccgcctcatttaacatggcagtcagaagtccatattcaaatgatggaatctgtcgtttttcttcaagtagaattcccattacaccgtaaatttcatcacttgtctgaatcggaagatacatcgcctttgcccccggaagtgtatgtgtgcagcagcccgcacgcttcttatttgcaatcacccagtctgccactgcccattcctgattatctatcatacctcgtaactcttctctcgactctccttcttttggaaacacccacggtcccaccgctttcccatctttattcaagaagaatacaaccggaagattcataagctttaacacctgaccgctcaattcttttaagatgtccttaatattatctacccggcgcattctcctgctattgtcaaggagaagttctgtccgatacatcatcttggcactttctcttgcttgtcttctggcattagaaatgatcgctgaaatactcagagaaaaaatcagcataaaaaggaacgtcacaccgtaccctttcttatagatttctaggctgtataacggttctacaaacaaaaaatcaaaaaccaacacactgattagcgatactgctgccggtagaaaccaccgtcttgtatatagagaaagaagcaatactccaagcagataaaccatgataatgtctgcatttaaaaatccaagatactgcattcccagtccggctgccgtcgacaatataagcgacagaaacccttttatcacttctgctccacatccttcccttctctgagaatcaacacctctcttctttttgaactcttcgctccactttctcttgttgctctgtctatccgggataatgtagatttctatgccctttgtgtagctgtcaatctgatctgtcagattccgcttccgctgccccagtactgaacgatgactcgttctcccaatgacaatctttgatactccgctgattcttgcatactctgcaatctgaaacgcaacatcctcaccgaagactgtcacaatttttgccccgagaagccttgccagcctgatattttcatctcttttcttcttcacacgctcatccgcattctgcagggatggtgtttctacatacagtgcggtaaatttcccctgaaaggcataggcaagcctcgatgcactgcggatgactttctcgcaacttggtgccggagaaatacagacaagaatatgttccccttgataaatctcccgcttctcatctcccgacactgcctgttgtcctttcgctgcctcccggttgactttatctgcagtcctccgaagtgtgatttctcgaagagcaatcagcttttctttcgcaaaaaagttatgaagtgcccgctctgcctgtgtagatttataaattttcccgtctttgagacgctggatcagcacgtccggctcaatatcaatcagcttaatctgtgttgccctatcaaaaataaaatctggaatccgctccttgacgtgtattccggaaatctttcctacgatatcattcaagctttccaggtgctgtatattaacggtcgtatagacatcaattcctgcgtttaaaatctcttcaatgtcttcatatcgtttctgatggcacatgcccggcgcatttgtgtgagctaattcatcaatcaaaactacttccggatttctctttaaaattccgtttaaatctacctctcttagtttgattcctttataatcgacaagaaggggtggaattttttccagcccctcttctttgctccttgtctctgcacgctcatgcggttcaatatatccggcaaccacatccacaccgtttttcttcagatcatgcgccgcttccagcatggcgtaagtctttccgactcccgccgcatagcctaaaaatatacacatctgtcctgtttcttttttattcatccaatgtaactcccatcttctcggcaatctcgatgttacactgcaacacatttaccttctcttctccgaagattccgagaaacttatgttctgtattctcttctacgattgttttcacttcttcctcagaaagtccgctgtttgcagctacgatcggaagctgaacttcggcggatgccggactgatatgaggatcaagtccggaaccggaagcagtcagaagatctgccggcacttctccttcaaatgcctttcctgtggcattctcatacttctgtttaaatgcttccacatcttctttcacacgttcctgaagttcttcatttgtacttccgtagttataagatccggaagctggacctgtgtaagtgccgtcctctttttccttctctgaatatacattataatttaccgaagaaactcttccctgaaaatactgttccccttcaaactcctgtccaatcaattctgaaccgacttcctttccgtttatttctatcatacttccatttgcctgttttttaaagagtaattggcctgctcccgtcatcacaagcggataaacaactccgcacagcacgatcagtaccagtgtgatgccaaatgctttttttaaataagatgtaaaatttttcatctttctcttctccttttttctgtctctataatcctaatagtgcgagcagaggtgtcactacaatatcaatcagcttgataccgataaatggaacgatgattccaccaagtccatagattcccatgttctttaaaagcattttctcagaacgcatcggtttatatttgacacctttcattgcaatcgggatcagacacggaatgatgatcgcattgaagatcaaagcagagaggattgcgctgaatggtgtggacagtttcataatatttaatacctgcatctgtgggatgacaagtgtaaacattgccggaatgatcgcaaaatattttgctgcatcgtttgcaatgctgaatgtcgtcagggatcctctcgtaatcagaagctgttttccaatctccacgacttccagaatcttagtcggatcggaatccagatcgaccatgttggccgcttctttcgctgcggaagttccactgttcatcgccagtccgacatccgcctgtgcaagcgccggtgcatcatttgtcccatctccggtcatcgcaacaatctttccttctgcctgctctttcttaatctcatcaatcttatcttccggcttacactctgcgataaatccgtccacacctgcttcttttgcgatggttgccgctgtcagcgggttatccccggtgcacatgatcgttttgataccaatctctcttaaccgttcaaatcgttccacaagccccggttttacggtgtctttcaggtaaatcacaccatagatgacattctccacacagacaacaagtggtgttcctccaagacttgaaatatctgtcacaattttttccagatcagaaggaatctttcctcctttggcagcaacatattttttgattgcgtcaaaggcacctttccggatctgtgtgccatcttccagattgacaccgctcatctttgactgagcagtgaattccacaaactctacctgatctgccgcagactcttccattcttgttcccattgtctttccaagctctactacagattttccttccggtgtcgcatcacttaaggaagtcattactgcataatcaatcagatcttccttttttaccccttccaccggaataaaatcggctgccagtctgtttccatatgtaatcgtgccggtcttatcaagaatcatcgtatcgacatcaccgcatgcttccaccgcctttccagacaatgcaatgacattatatcttgttacacggtccattcccgcaataccgattgccgaaagcaatcctccgatcgtagtcgggatcaggcagacaagcaatgcgatcagtgttgccactggaatctcaactccagaataatctgcgaaacaataaagcgtcacaacaacgattaagaaaataaccgtcagactgatcaacagaatattcagtgcaatctcatttggtgtcttctttctggaagcgccctcaacaagtgaaatcattttgtcaagaaaagaatgacccggatctgaagtgattcttactttcagccagtcgctgactactgtcgttcctcctgttactgatgagaaatctcctcctgcttctcttgtaaccggggcagactctccggtgatcgcagactcatcgacagatgcaatcccttcgatcacttccccatcccccggtatcatctcatttgtccgtacgatgacgatgtcaccttttttcagttctgatgcactgattttcttctcgctgccatctttcatcagaagaacggcagtcgtatctttctttgtcttctttaatgtttctgcctgtgcctttcctcgtccttctgcgacagattccgcaaagttcgcaaacaggattgtgacaaacaagatcacggtgacaattccattatagactcttaaatttgcctcatccccgaagattgtcgggaaaactgtcagcaccagtgtaataaaaaatccaatttccacaacgaacatgaccggattttttatcatatatctcggatctaatttctgaaacgatccgatgacagcagatttcataatatcctttgtcataaattttgtttttttactttgttcttccatttccatcaagatcctttcaccctattatggcatccacagcacgagatgttccgcgatcggtccaagcgccagtgccgggaaaaatgtaagtgctgcaaaaatatatacaacaaacacaagaataaatacgaacagtacgttgtctgtgcggagtgttccgactgtctcattgactcttcgcttcgcaagaaaacttccggcgattgcaagctgcgcgatcatcgcaatatatcttccgaaaaacatcgcaagtcccgtcgtaatgttccaaaaataagtattatctgcaagtccctcaaaaccagaaccattgttcgctgctgaagaagcatattcatacaatacttgcgacaatccgtgaaatcccggatttgtaattccttcctgccctgcacctgtcatcactgccagtgcagagaaaccgagaatcagaagcggatgaatgatcagcacaatcgcaaccagcttcatctcttttccctcaatcttcttattcaggtattccggcgtccgaccaatcatcagaccgcataaaaatacagcaagaatcacatacatgatcatattcatcaatccgacacccttgccgccaaacacacagtttaacatcatatgaagcatcgggatcattcctccgagcggggtcagtgaatcgtgcatattgttgacagttccagttgtaaaggaagtggtcgttgtagtgaaaagtgctgattgcgcaactccaaaacgaacctcttttccttccatattcccaatcgtctgatccagtcccgcttctgcaagcaaaggatttccagacttctccgccaaatagcatacggtaagtcctacaaggaataagatagacattgctgcaaaaatcgttcttccctgagaaccaaagcaagtcacatttcttttgatctttgcgactgcgtttcctgctttctcctttttccgctctgcggccattttaccaaaagtaatgacacaggcacccggtaaaagcatcatcgaatatagttcaatgaggttggaaatgatagtcggattttcaaatggagtggaagagtttgccccgaagaatcctcctccatttgttccgagatgtttgatactctcaagcgccgctaccggccccattgcaatatcctgaagtcttccctctatcgtctccacagttgcagttcctgccagtgtctgcggtactccctgccagattagaaggattccaatcacgattgaaaacggaagtaaaattcttgtaatgatgcggatcacatcttcatagaagtttccgacacctttgctgtttccagtaattcctctgcaaaatgccatacaggctgcatatccggttgcagccgacgtaaacatcataaaggtaatgactaccatctgacttaaataagaaagtccggattccccggcataatgctgaaggtttgtattcgtcataaaactgatgattgtgttaaatgacagtgtcggttccattccttcaatctgatttggatttgccagcagtattccctgcactcttaatatgaaataccctgcaaataccatcactgcattcgtcatcaaaagactgatcgcgtattgtttccacgtcattccctctcctttgattctgcacactttatacatcatccggtcgattctgttaaataccggatctgcaaatgtctttcggtttgtggcgatatgatacatgtaatttccgactggaatcaccaatgcaatataaatcgccagtgtgataataatctgcaacatttatttttcctccacatgatagtatttttctttttttctttctttggctgtcccgacctgcttttcgcaccagtccgccagcagtttcatacttccaaaacagatcagcaacaacaaaatcataaaaatatctgttatcattattcataccttccttctccatttgtttccatatcaaattagcataacaaaaattaagccggtgttataaatcttcacttttccattaaaatcctataaaattggatatcaaaaaaagcaactaccctattggataattgctttttctaaaacttctattataacttttttaatgccggaagccctcttcccattttatatccacccaaagactataccaaatggcagcatcaccacagttgtagtgagtgtaagtgctccgacaagtaaaaccggtgctcctaaaaatgcgagcgcacatgtcgcaactggatatttatctgaaaaatgatcaaactcttctttgcatttctttttcatcgctgtcacctgactgattatctgcttcatcattcattccctccttatgctttccacagattatcatgtcaggaattaaaatacttctaaaaagaagtgcgtaaagttaaaatcaaataaggattgttttttacaggcaagatgtctgtgaggaaatctcctccatctctgtccgtctccactcaatccgcgcaacaaacagatctccgtttacctcgattgtaagtttccctttctgaagttccacaaagcttttgacgattgcaagtcccagcccggatccttctgtgtttcttgaaacatccccgcgaacaaatcgctctgtaatatctcccggattaaaatttaactctcctttggaaatgtttttcattgtgatcgtaactatatcctcgttatctgatacatcgatatacaccctcgtaccttccagtgaatattttaaaatattgatcaacagattttcaaaaatcctataggtcttctgactatctaaagtaagatacaccttttcctcctgaaagttccaccggaaatcaagttcggatttttccatccgttcactcagttctaacttcacctgtttcaaaagtgaaataatatctacttttgccaattcgagcttcacatttttgcttgtcgccttgctgacctcaaataaatcctcaatcagtactttgagccgcatagattttcgctccaacacgtcgatatagttttttcgctcttcctccgtgatcccttcttctttcagcagattcacatacgtgatgatcgcggtcaacggtgttttcagatcgtgggaaacattggtgatcagctccgtcttcatcttctgacttttgacctcttcgtctaccgccgacttaaatccgctctggatctggagtaactgctttctgaccggatcaaaaattccgaaatcctgttccatagacatatcaaggttgccagatgcaatcttctctgtcgcctgaagcatccgctgataatcctgtttgatcttataatattttttgcagatagtccggaataagaccactgagtagatcagcactcccgcaattccaaagaaccatcccatacaaaacagtgatacgatcacaaactgtgctgcaacaaaccggaagatcactttgttggattgttcctgcaaatcaatccgaaagaatatgtcaacccgctttgccagcccgctccatttctttttcagaaaagaacatgctttttccagtttcgcacgatgttttttcagaaacggaatcaaaaatatcctttctctgactgcctgtttccatccgatactgatcagatttcggatgcttcctgtcacccagtaaatcagactgaagtatatgatccagacgatcagattccatgccatgaccatactttctgcatctccattgctcaatccgagctgtaccagtctatcctgaatatctcctctcattgtgctgatgaccagactggtaactgcctcccacaagatcagcagtcctatgacagtaattccaatgatctctaccggcatctggaaccctctctcgtttccggtatttaactttttcacaaacggaagaagtatcgccgcaccgatcagaacaaaaatcgaaattctgatcatatccgccattccgcttctataataaacggcataaaacggattcccgatataggactgatattcctccccctgttccttagtcataccatataaaaatgtacagtctgccggagttcccatctcttctgctgtctctacatcttcatattgatcttcgtattgataatacagtccttccgacagacgcactttcattttctgggcataagttccatagcattctgtcacttctgcatttccaagatgatcgtattccatctgtacgatccagtcatatttttttagatgatcttgtgcaagaagttgttttaaagactccccgttcttaagaatcgtttttccatttttatttaacacttcatattgaagatatggacgtatttcccggaaagaatttcccggtggatccagctcccgcgtattcgccccactgatttcttcatataaaacttgatttccattgtaaagcatttccgcgaattcccgtgtcgtataatattttctgctctctttctcactctgctctcgtatatgcggataggcggacaaaatcaccatcgccggaactatgcagagcagcgtccataaaaaatatttgatcttacatttgtttttccatcttgtagccaattccccacaccacctttacatactttggttcttttggattaatctcaatcttttcccggatattccggatatgtaccatgatcgtctccgtgttgaccgctttttcattccagactctctcatagatctcctctgcggaaaagactcttcccggatgtttgatcaaaagcagcaaaatcttaaattcaatcggcgtcatcttgacctgctttccgtccacaagcacttccacacggtcttcattgacctccagccctccgatcatataggatctttccttttcttcttttttgttgagagcctcctgaaatcgattgtatctgcgaagctgagaattcacccgcgccatcagttccatcggggtaaacggctttgtgacataatcatctgcaccgatattaagccccattactttatccacctcctctgatttcgccgataacataatgaccggaaattcatatttttcccgaagtctcatcgtcatcgtgatcccgtccatcaccggcatcataatgtcaacgatcgccagatcgatcttttcccgctcaataattgctaagccctccttcccattctctgcctgaaagactatgtacccctgactacgcagataaatctccacaccctcccgaatctctttatcatcttctacaattactatctgattcttcatatcccctgctccctttcgttccttttcgtatactttctataatagaatgaaatcttccataaacagtttcagtatactacttttcctttgcaaaacctagtataaagcagagttctaaatatcccacggacaaaattctaaagattttctaaaggttttcatagaaatttcccgagtgttaaaaaatacaccctgccgaaattttccgacaaggtgtacctttataatgtctgttttggattcatctttgcatgttcttcctgcaactcatgatacagttccaaagatgtccagttctgattgtactccgtcacaatcgctttcagattgactttcgcgattcccgcttttcgaaactcctttaatagcaagtcgatcctgctgcttgtaaatcctttcatcacaagcatttcctctggaaatccttctccctcataaatgtccccggacgatggtatctccttatttcccgccaaaaatccaatcggctccaaatactgctcctttgacactttttttatctttaccttcatttttaaaagcaccatcttaatcttacgcgccttctcaccctcatcaaaattatacaataacacggtctcaaaattcatctcgtttcctccatttcttccaggcagatactgttccctctgctcttctacaatgatacttcttcgttccttaaattgcaaagcatccgctcaagataactgtaaagcatcttctgctcctcctctgaaaatccattcgtcagacgcttctccaactcttgaaagacaatcgaaacttcctttgccttctcgcttccagtcggtgtcaatgagatgagaaaacatctcctgcactcctcatcggtctttctttctacatatcctagttggacaagcttatccagatttcttgacaacgtcgtctggtctacatgacacatctgtgccagttctttctgcgtaatttctgtctttttcaacaacgccttcagcactcccggctgtcccggtgtcagacccagcttttcaaatttcggtcttaacgtctgtctgcgctccatatcaaggcagaacaaaaggtctctgatcatcgccgttttttccatatatgttttcctcttttctttcctttttattccaattcaaactgtcccgtatataactggtaataccttcctctctgctccaacagctcctcgtgatctccccgctcgataatttccccatgatctaacaccatgatcgcattggaatttctaaccgtagagagcctgtgagcaatgacaaatactgtacgtcccttcatcagagaatccattcctttctcgatcaatcgctccgttcttgtatcgatagaacttgtcgcctcatcaagaatcagcaccggaggatctgcaactgccgcccttgcaattgcaagcagctgtctctgcccctgtgacagatttgcaccgtcactttcgatcatcgtatcgtatccgtttgggaggcgccggataaaagaatctgcattggccagtttcgctgcctgctccacttcctcctgacttgcatccagatttccatagcggatattttctgcaatcgtccccgtaaataaatgagtgtcctgaagtaccagtccaagagatcttctaagatctgccttcttgatttttttcacatcaatcccatcataagtaatacatccgccctgcacatcataaaaacggttgatcagattaatgatcgtcgtctttcctgcgccagtcgaaccgacaaaggcaattttctgacctggcttggcatagagactgatcttctttaagatctgtttcttttctgtatatccaaactctacctcatgaaagcgtacatctccacaaagcgggaccactgtcccatcctccgtatctttccatgcccattttccacttctctctctgcattcctccaaagagccatcttctttttcccgaactctgcacagtgtgacagttccctcgtcccactccagttcttcgtccatcatatcgaaaatcctctctgctccggacaatgctgccagcaggaaattgacctgcattgtaaactgattgaccggcatcgcactctgcctgacgtaaactagatacgatgcaaggcttccgagatccatcatcccttggatcacaaacaaaccacctacacatgcagaaaccgcataattgacataggagaggctgacgattgtcggaatcagcatcccggaatactgaaatgcacttgtggaagctttccggagattttcatttcttttggaaaattctttaaaatccacctcttcatggttaaacactttttcgaccttctgtccatccaccatctcctcgataaatccgttgacctcacctaaatatttctgctggctgttaaaataccgttttccccttgcaccgctatactttataaagaaaaacatcaaaagcatgaacaccaacacaatcagtgacaacttaaaattcagaagaatgatacagataattgttccggcaatcgtaaaaaaactctggatcaaagttgtgaaactgttgtttaacgcttctgagatcgtatctacatcattcgtaaatcgactcataagctccccatgtgtatgtccatcaaagtatgacaatggaagcccctgagtgtgacgaaacaaatcttctctgatctcacttaccacctgctgtcccgtacgcgccataatctgtccatagccataagttgcaagtactcctaccgcatacatcactcccataaagaaaagcattctcgcaagtccttccacatcccccggaagaatatagcgattgacaaccggctttaaaagatatgtcccaaaaatgctcgccacactgctgacagtaacaaggatggctacaatggccacggcaatcttatgtacaccgagatacccaagtaatcttttcaatgttttctttgtgtcttttggttttttatagttcatcgtccttgccattacagtccacatccttcctgctgagagtaataaatctcttgataaatctcatttcgctgcaacagttcctcatgtgttccacaatcattcagctttccatcttccatgatcagaatctgatctgcatgcatcaccgaagtaattctctgtgcaataataatttttgtcgtatcagcgagattgttctgtaacgcctccctgatcttcgcctcggttgctgtgtccactgcacttgtagaatcatccagaatcaaaatgcgcggccgcttcagcaatgctctggcaatgcacagtcgttgtttctgtccaccggacagattcacgccaccttgttccacctgtgaagaaagtccatctttcatctgtaaaagaaattcatctgcacatgccatacgacatgctttcatcaactcttcctcacttgcatcttcttttccccagcgcagattgtccgcaatcgtacccgtaaacaacgtatttttctgaagtaccatagcgaccgcctctcgcagatgcttcagcggatattgtttaaccggtatttgatcgatcaaaatttctccttctgtcacgtcatacaaccttgggatcagctgtacaagtgtagactttgcagatccggtccctccaatgattcctaccgtctgccccggttcaatatgaaaagatacattcgaaagcacatatttttttccttcttttttatatttaaaagaaacattccgaaattcaatctctccggctttgatctcacctgtcgcttccggatcctctttcagatcaatctcttcatcaagtacatccaaaatccgctttccagaagccatcgctcttgtcagcatcagaaacacatttgagatcatcatcagcgagtttaaaatttgaagaacatagcttaaaaaacctgtcagttctccgacctgcatctccccggcaaagatcagttttcctccgaaccataaaatgcatatgatcgttgtatacatgacaagctgcatggcaggcatatttagcacagctgttcgaaaagatttctcagaaatactttttagttcctgattgacctgcgcaaatttcactttctcataatcttcccggacatatgccttcacaacacggattgccgtcagattttcctgaatcatccggtttacaaggtctattgccgactgcatcctcgtatacagtggtctgacttttcggatcacaagccaaaggcagattccaagtgtaggcgccgcgacaaagaatacaagcgccagcttcgcattcaataagaaagacaagatcattccggtcaccatcattaatggagcccggatcagcggacggattccgtttgaaacagcattttggatcaatgtcacatcacttgtcaatctcgttacaagcgaagaagtggaaaacttatccgtatttgagaaagaaaattcttgtattttacgatattccgccttcctgagttctgctccaagcccctgcccacaaagtgccgcaaacctggcatacccgatcccgagaactagagaaatcccggcacagaataccatctgcaatcctctctccagaatatatgcctgctctccattcgccacgccaacatcaatgatatctgccatgatcatcggaatgatcagctcaaaaagcgtttcaaatgccacgcaaaggcagcttagcaccgcatacatcttatacttttccatgtacacataaaaccgttttagcattccatcaaaccccttcctttttctctaacacttctgcaatcttctcttcctgcgtatacctctatacatatacaactgtcacagttacaatattttcatatacattagttgtatatacaacaatcatctttatcataaacatatttttttccattgtcaatgaaaagcaccaataaactctttcctcttgcaatatgaaaggctgcggaagtattctctcacctccgcagcctctcctgcattttctaaaacatcgctgttcttttttctctgtactaatgaatctccaaaagcttctgctttagttccccttccatacgatttaactccacctctgctgcgcgacgtttttcctttccctctgtctggattttcatcacttcatccagcgtagcgatcaacgactcatttgtcgccttcagtgtttccatatccacaatgcctcgctccgtctcttttgcggtctcaatcgttgccattttcaatgtctctgcgtttttgcggagcagggcatttgtcacgtcggtcacttcccgctgtgctttcgcggccttcgcagaattttccacaccgattgccagtaccatctgactcttccaaagcggaatcgtattgacgatcgtcgactgaatcttctctgacattaatgtatcattgctctgcacaagacggatttgcggagccatctgaagcgaaaccgcccttgtcagttctaaatcatggatcttcttctcaaaccgattacaaagagacgaaagatcacttaccgcctgtgcatcttccggcaagccgcttccctttgcctttgcttcaagctgtgccatctctgtagtgcgcacttcttccagctttcgttttcctgcagcaatatacatcgacaattctttaaaataagtgacatttaattcatacattttgtcaagcattgcaatatctttcaataactgaatctgatggctctcaagtgcatcacagattcgctcgacatttccttccgccttctcatactttgctttcatatttgccagcttattcccacttttcttaaagaagctaaaaaagcccttatcttcctcttcttcctctagagttctcaactccgatacgacacttgccagcatttcccctacttctccgaggtcttttgtgcgcacattctccagcgccgtctctgaaaaatccgccatcttcttctgcgccccagcaccgtactgtaaaatcatattggaactgtgcagatcaatcttcgccgcaaattcttccaccatgcgtctctcttccggagagagattcacttcctcttctttcacaagtggatccggttccttctctgccaccgtcgccttctcttctccgaatgggtccaacgtcaatgtcggcgctttctgcatcatctcatctaaatcctgtgccatcctgattcctcctatcctcatctgccattttctgacatacttctaaaaatcactctctttgtagccttccctcgcaaacattgcttccagcacagagatatctgctgacacatcaaatgccgtatcctgaaacaagtcatccaaaagcttctcaaatgcgacaatgatcgtatccatcgtgcgctcaatctctgtcattgctgttgtaacattctcacctttgaccggaagtccgtcaaactcccgataagtattgaccagcttcaatgttgtcggcaaataatattccataaattttttcatctctcccgcctgctccggatgacggatcacggactcaaaaatcttactgatgatcagttccaatttatctaattttgccgaaatcacctctcccggaattgcatcatttgcctctcgaagtgacgtaatatatcgtccaccttcctgaaccatctcctgaatttccggagaaatctcctgggcttcctttttcgcctctctccgctgctctttcttctgctctgcctgtctctgttttgccgccttctgctcttcttctcgctgtttccacgactgctgtgcctgtaaatactgttgatacgacttatcatccaacatcagacaagtcccctgctcatcaatatgcccttgaggaaatgctccccgtcggatcatcttctttaactccctcaacatctctttctccgaaagattcatcttcgccgccagttcctcaatctgacagaacgctcgtccatttaatatttccacacagcgaagcacttttttatatccttttctgttggaaagccctttccataaaagtatcagcgacaaaataaaaatcggaagctgaacaattaaggaaatacctagcagatgcaggtgcccggtaaacagagaagaaatcagcaaaatcagctccaacaagcctcccaaaccaagtcccaacgagccaaacacgatcagcaaaatcccagatactttcccaactggctgaaccctcttctcatacgtcgctgtcggctgactttgaccagcaccacctgcatacttctttctcccatatgcctgctctgcgcttcctgaccgtgctgtgcttccataagttcggtctgcgctttctgactgggttgttctttcataagtacgcttctgacctcccatattctgttgccacttggactggtctgcacggtcgtatttgctatgaggatctacatgcggaaggaaatccgtatctctgtatcccccaaactgccgtcgtgcttcctccagtgcctggttcactgtccttccgatatcctgattcaacttactgaagttcatcgaccgcatcgcatcgtcgaccatcttgctgacctgctcacctatatttgaaaaatctctgttatccataactctatcgcagcctttctctttttgcgctctgattttcttctattatataaaaaaccaaatttttttacaatgaactttttctaaaaatcattcctggaaaggaagatacagtctcccttcaaccattctttgcttctttggaatctatcatatatttttcctcctcaccttctatatttacaattcaatgcttaaaagctcttcgtctgatttttgcgtccatttttgctttttctatcttactatagattacatgaaaataaaaaaaggagcaatcccttttcctgtgaatcgctcctacaatctttgtttttctaaatactttttataaattttctttaaaaaatgtttccattgccgctgctgcctcagcttcatcggctccttctacccgaattacaacttcttctccctgctttgccgcaagccccatcacaccgaaaatacgcttcgcatctgctgctttttctgctttctcaattttgatatccgatgcaaattttgccgcttctttgacaagaagacccgccggtctggcatgaattccctggctatctgtgattgtgtacttaaattctttcattttcttttcctcttttctttctttttctctttattttcatccgctctacctttttttcggaagcggtttttttaggatcacaatacctgccatcgcaataacagcacctaatgccaacgcgatcaaaaacatcggtgcatgatccatgattcctactacaaatattcctccgtgcggcgctcttgatccacattcaaaaaacatggaaagtgcccctgaaaccgcagaacccagcatacacggtggaatgatgcggagtgggtctgatgctgcaaacggaattgctccttctgtaataaaagagagtcccataatataatttgtgatcgtcgtctgttgttcgctcttcgtaaagcggtttttaaaaaatgttgtcgccagcgcgattgcaatcggcggtaccatccctccgatcatgaccgatgccataatctcatactgtccacttgcaatcgatgctgttccaaatacatatgctgccttgttaaacggtcctccaaaatcaactgccatcattcctccaagcaccgctcctaacagaagtctgcttccttctcccatacctgcaagcatatcattcagccaggtattaaacgctcccacaggtggatttacgataaacaccatgattgctcccataagaagaattccaaaaaatggatacaacagcaccggcttagttccctccagcgcatgcggcagacgctcaaatacctttttcaaaagcaacatcaaatatcctgccacaaatcccgcgatcaatgccccgaaaaatccagacgaaatccactggtcttccggaagaaatactgatgttcccgcttttgcaagcaatcctccgacaatccccggcatcaaagccggacgatccgcaatgctcattgcaatgtatcccgcaagaatcgggaacatcatcccaaacgcggtgtctccgactgtctttaaaaatctggaaaatgtatttccggttccaaaaatatccgttcctgcattcgcaccgtcaaacagaaatgccaaagcgattaaaattcctccgccgattacaaacggcaacatatgggaaactccgttcattaagttcttataaatctttcttccgaatgactctttctctccaccaaatgcttccacttcttctttccggtcgctgtgatacacagaaattgttccactttccgcctcctcaatcagctcttttgccctgtggattccatttgcaacttttgtcacgatgactggctttccatcaaatcttgccattctgacatctttgtccgctgctacgataatacagtcacatgatgcaatttcctctggtgtcagtacatttttatctccaccagaaccatttgtctctaccttaatggtatatccaagttcctttgctgtccgctcaagactttctgccgccatataagtatgagcaattccagtaggacaggctgtcactgcaagaatctggtaacgtccctctgacgactgatgcttttccttctcctgctcttctttcgcatttgtttcttccgaagcatcttcctccccaaatttttctttctccgcctcatctacgtatgcgaggaactgttccaccgattctgcatgaatcagattctcccgaaaagcttcatccataagaagcatggacagtcttccaagtacttccaaatgaatattatccttcgtatctggagctgcgatcaaaaaaatcagattcacaggaagtccgtccagcgaatcataatccacaccgttttttacaaccattgcagcaagtcctgcttcctttactaccggtgttttcgcatgcggaatcgcaattccttccccgattcctgttgttccttcttcttcccgcttctttacacaggatttgtagatttcttcatctgaaatatttccggattttaccatcagcgaaaccatatggtcaattgtctcttctttggaagtcacttgtccatcaagatcaatgctacatctctttaataaatctgtaatcttcatatctttcctcctacaatccgtattcctccggtggttgctgcaaaagctttacaatctcgtcttttcccgcaagccaggataaaaatgcacttgcacttcccgccgcaattccaagctgaagcgctttctcataattatttgtattaaggtaacctgtcagaaatcccgcaaccatggaatctcctgctccgacagaattaactacattccctttcggcggcatctttctgtaaacctttccgtcttccgtcaaaagaagtgccccatctcctgccatcgatatcagcacattgactgcccccatttcctgcagctttctcgcatagacaatgatgtcttcctcctgtttcagtgtcactccaaacaattcttctagttcatgattgtttggcttaatcaaaaatgggtgatacttcagcacattcaaaagcagatcttttgtagcatctactacgatgtggatttttcttcctgcaagccgctccataattctctcataaatatcttccggaagtgtattggggatgcttcctgcaagtacaagaatatctccttcctgaatctgctccagcttttcaaacaattcccggattgcctccgctgtaatttccggcccctgtccgttaatctcactctcttcacttgcattaatttttacattgatcctcgtcattccctctttcagtctgataaaatctgtcgtacatccaaaatcggtcaacatcttctccagtgcatctccggtaaatcctgctataaatccaagcgccctgcttttcataccaagatttgccaatactacagacacattgtttcctttgccgccgggatatatcgcctcacaagacgtccgattgacttcccccagtgtcagattttctatctggacgacataatctaacgaaggattaaaggttactgtatagatcatctatttcacctccacaatgtttttatactttttccatctggcatcctgcaaatctgttgtaagcactgtcgcttcatgaaatgttccaaaccgcaccgcggaaatctttccaatctttgtactgtctgccagcacataacactctctacattgcttcattgcttgttcctttacaaaagcttcatgaatgtccggtgtcgtaaaaccagcctcctcatgaactccgttcgttccaaaaaatccctttgtaaaatggtagcgtttcaaactctccatcgtttcaccgccaacaacagcctctgtcgctgcctttaattctccacctagcaggaacaccttatatcctttctctgcgagtgtgcgggcatgcacaattccatttgtcacaaaaacagctccttgctcgcagatccagtcgatcagacatcctgtcgttgtccccgcatccacatatacaaaatcattcttttcaatccgttctgcggcatactttgcaatcctttgcttttcttccatattcatgtcttttcgaacggataccgcctcatctttcgtcgtataccccatctgaagcgccgtagcacccccatgtacttttacaagctggtgtcgtttatgtaattctgtcagatctctgcggatcgtcgattcggaagaatctagtaactctgtcaactcctggaccgtcatcgtctttctctcattgaccagcctgataatttcatgaaaccgttcttctgccagcatctcgctacctctctttccttttttgttgattccatattacaatcattttcaatcatagtcaatcaaaatcagtcaaaaaacttcaccaaatttcctgttttcgttttagacatttttactaaaagatcattttctaaggaattgtaaaaaagattgtttctgacaaaaataaatagtataataggcacataacaaactgatgcgcgcatcacacgataaaggaggaacctctatgtccaaaaaatctaaagtggcaggagatgccgataaaatacacgaagtaaaacaaactgcggaacaggatccagccgtttccagtgcacttttttgtgggacggactttgatatctgtgaaccagtcccttccaccagttcaaaggaagccgacatccttccattttcagatgtctcttccgaaacagaaaaaacgtctgaaacaaacaattatgcagacctttccgggacaggtaacacctcttccgaaaacaaggcgattgcctctgaaccagcctcttctgctgcttccaaacaatcaaacactgtagcatcagattcttcctatgaagaagaaccccttcagagcgataccagacacgagcgacgctccttcttctccaaaacagcaagaaagtctgctccttcgctggaagaacagattctcgcccggataaacgctgcagatctgatgcgctatcttgagatggaacatgaaaaacttcatctgcttcagtcgcggaaagaatcgcgtgaaaagcggctgtttacaatccttcagctgctcttgtcactcgctgctgttgtcactgtagtctttcttctgagagataacccaactgtgctcgtcaatattttatatatcactggaatcattgtcgttctctggctagtgaaaaaccctctcgaaaaagaccgtaagaaaaaagattgatttcggaaaggcagtatttccgaacatacaaaaagaacgaagccaaaaggaatcgtcctaaaaagtcagttttttcttctcactttttaggacgattccttttggcttcgttcttttttctcaaaaattctctttccatctctcttctcaaatttgttttatgacagatcacactaaagcttctctataaaaaacttttggattgcttctgccgcttcctcttcatcttcgccttgcacagtaacgtagagtctgtctcccttgcgtgcgatcagactgatgatccccaataaacttttcccactcaccatccgcacttctttcttctccacttcaatctcagaacgaaattcttctgtcatgtctacaaactcaaccgcctccttcatatgaagtccctcttctttttgaattacatattccagttttttcattagcttctacaacctcctctccccacaagatatttttatgtcgtaattatataaaaatagttttgtaaaatcaatatattttattcactttttctaatcagctttttctaatcagctctcttttttcctattcaaacagaggtgtggatagatatctctcccctgtatccggaagtaagactacgattgtcttcccttcatatgcttcctcttttgcgattcggattgccgcacacagagctgctccagaagaaataccaacaagaatcccctcttcttttgcaagaagttttgccgcctcatatgcctctttagtttccacagccacaatcctgtcatagatttctgtgtcaagaatctccggcacaaagcccgcaccaatcccctgaattccatgtacgccagcctgctcgcctgacaataccgctgatgtgcgaggctccacagctactacctcgattgtttggctcttttctttcaaatattttcctgttccggtaatagttccacctgtccctactcccgcaacaaacgcatctacgtttccttccgtatcttcccagatttccggacctgtcatacggtaatgtgcatctgcattggctggattgacaaactgtccaagcacaactgctccttctatttctctctccagttctgctgctttttctatcgcacctttcattcctttttttccttctgtcagtacaatttctgccccgtaaccctgcagaagttttctccgttcaacactcatcgtctccggcattgtaaagaccgcacgataccctcttgcagccgcaatcgctgccaatccaattcctgtatttccacttgtcggctcaatgatgacagctccttcttttaaaatccctcgttcttctgcatccagaatcattgctagtgctgctcgatccttcacgcttcctgccggattaaagtattccagcttcaccagtatccttgcctgcaatctcagattttcttctatcttcttcacctccaacaagggagttcttccaattaactctgtcatcgttgtataaattttcgccatgttgttccatcctttctgtctcattctattttacatactgcgaatatgtttcgcagttagtttcaactcacttccatcctattatagcatgcatctgtttccttgtgaactccctttctcacgactgacctccttcctgcacttttacctgcctgcactgcctcctcctacctttttatttatatattttgctatttttgtgatgttcttttcttgtttttttatatattttgttgacattctaccatcattatgctatcctcaagaagtgttcagcacatctggacaacagatttattttttatggaggtaacacaatgaacaaaggtactgtaaaatggtttagcaaccaaaaagggtatggattcatttctgacgaagctggaaacgatgtattcgtacattactctggtctgaacatggaaggattcaagactctggaagaaggtcaggcagtggaattcgaagtgacagaaggcgctaaaggacctcaggcaatcaatgtcgtaaaactttaatcagaatctttactgtgccttttatttatatatattaatttcgatatttcataattaaaaagcagtacttgtattacgtgattaaaatagagctgatggcagatttgggaagttccctctgccgccagctcttttctttttgagtcctttgctaaagttgagcaaaactattttacatcaacttctttaacaatcttaaatgtcctttatacggtggatatcgaaccggaagatctagccacagggcctttttcaaaatgctctttctatgggtaaatgtatcaaaccctgcttttccatggtaggatcccattccactttccccgacacctccaaatggcatatgcgaagtagccaaatggacaactgtatcattgacacatcccccgccataggaaatctgtccgagtacctttttttctgtcctgcggcttcttgtaaagagatacaatgccaaaggttttggccgactgttgatctgtgcgattgcttcatccaaatcttcatacacaagtaccggaagaatcggaccgaaaatttcttcctgcatcactggactgtcccaggatacccgtatcagaattgttggctcaatctttcctgactttctagaccattctcctccaacaacagtatgccgctgatcaatatatccacagagtcgatcaaaatgtttttcattgatgatcttcgggtactctctgtttttacatggttgcattccatacaacttctcagtcatcctcttcagataagtgagcaacttttttctcacacttttgtgtacaagcacataatccggtgccacacaagtctgacctgcattcagaaattttccccacacaatcctttttgctgccagtttcagattggctgtctcatcaacaatacacggactttttccgccaagttccagactgaccggagtcagatgctctgctgctttcttcatcacatactttccaacttccatgcttcctgtaaaaaagatatagtcaaatctttcgttcaacaaactctcattctcttgtcttccaccttctatgcagcagacatatcccggtacaaaaagctcctccgtcatctcccgcatcagcctggagacatttggggaataggcggatggctttaatactgcacagtttcccgcgccaattgctgcaacaagcggtgcaatagtcagttgaaacggataattccacggagacatgatcagcacaaccccatatggttctgcataaatccgcgattttgatggaaattgtgtaataggtgtcggaacttgctttgtcgcagcccacccacgcaaatgcttcattgcatatcggatttcttctttcacaattcctatttctgtcgcataggcttcaaaaggcgccttgttcaaatcttcccacagcgccttctctattgcctcctcatgcgcttctatccactgatacagctttctcaattgaatcagccgaaaagaaacatcctttgtcacctgtgtctgaaaatattccctctgtccctttaataccttctgatagtctgtcatatcttctgcctttctgtatggatcattcatactttacagagcgtctcccacgcttccgtctgtaacctttctttttcgctatcattataagaaaaatgtgctgcttttacaacaccatccggcatagaatcttcaatgcttttctcactcctatcctcgccgccttcttccagcacaagcaattcttccaatctggccttcggcgcaaaataagtaaaaaatacgctcttgttccatgttttcttttccacttgtttcatcatacaactctcccttttctctttctttttactttttcttttgttctgctgtttggaataacggcgggaaagatcatccagccgggaaaacaagaatgttttcatgattcattttctcttttgaaattctacttgaaatggtaagcggcgaaaaaaaccgcttaccgatatttcttatcatagcacacttcccctaaaagggaaagtccctatttgtttaatcttttacagatcaaacagtgacagctgattcgtttccggcaaatcgccaaacatcccaagatccgccataaagtcaatgacagttttactaaccttcgtccgctgtctaaaatcgtctctcgaaagatatggtccatcttctgctgccatctccactgcttccgccgccttatcgcccattccttcgatgctggagagcggcggcatcaatttgccgtcaatgatctgaaattttgtcgccttcgcccgataaatgtcaagcggaagaaattcataccctctcgcatacatctcctgcacgatccgcatatctttgagtgtatcctgatcctttttactcagagaatccgaacggttcttgtagtcccggagataaaactccagtttttccttgccctgacacatcaattcataggaaaatgcagatgcacggatactaaaatatgccgcataatatgccagcggataattgactttgcagtaggcaatccggtatgccatcatgacataggccgctgcatgggctttcgggaacatatatttgatcttcttacatgaccagatataccagtcgggaacgcccgccgccttcatcgcatcttcccattccggcttcagcccttttcccttacggacactctccatgatcgtaaaggacagctcactttccattccggtattgatcagatacgtcataatgtcatcacgagtacagatagctgtagaaatcgtcgcttttccctcctggatcaacgtctgtgcattattcagccatacatccgtaccatgtgacaaaccagagatacggattaggtcagacaacgtctttggctttgtatccacaaccatctggataacgaaatcagtcccaaactccgggattccaagacatcccaccggacatcctccgatatccgaaggcttgatcccaagagaccctgtatccgcaaaaagctgcatcactcccgggtcatccaaaggaatctctgtcgccttaaacggctttccggtcagctgctccacaagttcctccagcatcttgatcatcgtcggatcatcgtgcccgagaatatcaagcttcagcaagttatggtcgatcgaatgatagtcaaaatgtgtcgtgataatgtctgtcgtcatatcatttgccggatgctgcaccggtgtgaaggaattgatattctccccgtgaggcagtacgatgattcctcccggatgctgcccggtgctccgccggatcccggtacacccttccacgatccgctcaatctcacacttccgctttctgcttccatgctcctcataataattttttacaaatccgaacgccgttttctccgccaacgttccgatggtcccggcgcggtacgtctgcccttcgccgaagatgacctcggtatacttatgtgcattactctgataatctcccgagaaattcaagtcgatatcgggctctttatttcccttaaatccaaggaacgtctcaaacggaatatcaaatccatctttgacaagcggttgtccacagttcgggcatactttatccggcatatcccatccacatcctccggcaaatgcacgcacttcctccgactcaaaatcactgtaatgacagttggtacagtaataatgcgggctgagcgggtttacctcggtaattcccgccatcgtcgccacgaaagaagaaccgacagaacctctggagccaacaagatatccatcctcgtttgatttccacaccagcttctgcgcaataatgtacatcacggcaaatccattggaaataatggagttcaattccctctcaagacgttctacaacgatctcaggaagttcttccccgtacatactatgcgccttatcataacagatattcctcagtgtctggtccgaatcttcaatgaccggaggacacttatcgggcctcaccggggaaatccgctcgatggaatcggcgatcttatttgtattcgtgatcacgacttcctccgccttcttagatccgagataagaaaattcttccagcatctcctccgttgtccgaagatacagcggcggctggctgtccgcatcagaaaatccttttccggtcataatgatccttcgataaacctcactgtccggatccataaaatgcacatcacaggttgcgacaactggcttttgaaatttctctccaagctgtacgatcctcctgttcatgttctttagatcttcctcactcttaatatttctctgcttctcactggcgatcataaatgcgttgttgccgatcggctggatttccagataatcgtaataatctacgatctttgcgattgtctcttccgatttcccatccaaaagcgcccgatatacttcgcccgcctcgcaggcacttccaaggatcagcccttcccggtacttgttgaattcgctttttggaattcgcggacgtctcgcaaaatattttaagtgcgagagggaaacaagtgtatacagattcactcttcccacttcattctttgcaagaatgatcgcatggtaagtcggcattttcttgatcgcatccgggttcatatccccaaatgcattgacttcttttaaagttgtcatccctcgttcctttaacatctcaataaatttcacatagatttccgccgtcgctgccgcatcgtccacagcacggtgatgattttccagggaaatgtttaatgccttcgccacaatattcaacttatatttggacaaggttggaagcagtacacgggcaagtcccacagtgtccaccgaggtaaatgtccggcttcttccaagtctgacacagttctgctcaataaatcccacatcaaatcctgcattgtgcgccacaagcgcagactcaccgacaaaatcaagaaatgccggaagtgcctcctcaatctttggagcctccagtaccatgtcatctgtaatgtgcgtgagctgctgaatctcaaacgggattgggacctccggattgacaaacgtactgaatcgatccacgatcgccccgtccgtgattttaaccgccccgatctctatgatccggtcttccgccgcgctgaatccggttgtctcaatatcaaatacaacaaacgtgtcatccagtgtctgtccctgttcgttgacagcgatctctgtcaagtcgtctacaagatatgcttccaccccatatatgatcttaaatggatcctccttgtcaagtcgttccacataatgattggcatccgggaaggcctgcactacgccatggtccgtaatggcgatcgcctgatgtccccagtcatgtgccctcgccacaagcgcctgcgcctcagatactccgtccatatcactcattttcgtgtggcagtgaagctccacacgcttctctgggctggtatccttcctcgttgtcgtaaagtcactgatcttacggatacccacaacggaaccgatcgtcagctctccatcaaacttatcaatcgtcgtcactcctttgatcttcaaaaaagcgccttttttgattcctgtgagaatctcaggaagctgttcatttctcgtgaacatctttaccatgatcgtatccgtgaaatctgtgattgcaaacatgacgatcgtcttctcatttcgaatctctcttgtctccagcttcaaaatctttccgcggatcgtaatctctcccatctctccgaccacatcggaaagcggaattgcctcgtcctcaaaatcccttccatatagtacatccggattgtcagaccgcttcggagagcggtaaaattcttttttctgaaattccctctttggaaattcctttttcttcgattctgcaggtgctttctcctgtttcggaacactttccttcttctttactccttctgtcttttccttcttctgagcgatcttttcctcatgaaggcttgcattctgctccaggattgcatctacttcctgctgaatccgaatttctccgtgtttcttattcttactttcttgcggctcccgatacaatactttaatcttcgtcggaacctgacaccgctcgttaaaaatccggtcaatggttcctacaatcgcatcttttttcccttctgccacaatggaatctgtcatctcaatacaaagagtctgcgtgtcctcaaatgtacacactgcattttgaaacatattgtactctaacatactctgtcgctgaagttcatataaaatactatcccgatactctcgcagaagattttccggtgtataaagctccgaaagctgataggtctctaccacctcaacctgaatctgtgtatgtccgaataattgttcccggatcatctcttccatcttgcagacagaccgctttgcaatcagatgggtgctgcatatatgtacccgtataaaatctctcagagaagtggtcgtgactttcatcacttccacttctctgaaaagattctcatattctttatttacttttaatgtcggaaatacatcaaaaaataattttcccatgtatcatctgccatccttctattcgttccaattcaaaagttcttctcttaatacagacaagagctgctcttctttgacctttttgataatttcaccctttttgatcagaagtccttccccgattcctcctgcgattccgatatctgcttctttcgcttctcctggaccatttactacacaacccatcacagccaccttaatatcaagcggaatatctgccaccatattttccacttgattcgcaagtccgatcaagtcaatcttcgttcttccgcaagtcggacaagatacaacttcaataccgccttttcgaagtcccagtgtctttaagattaattttgcagacttgatttcttccagcggatctccggtcagcgacacacggatcgtatctccgatcccctgatataaaatgattccaagcccgaccgaagacttaatattgcctgacaataccgttccggactctgtgataccaacgtgcagcggatacggacactgctttgcgatcagctcatgtgctttcacacacatcaagacatctgaagatttaatactgacaacaagattatcatatcccatctcctcgatcaagcgcactttgtccattgcactttccacgattccttccgcagtcacaccgccatatttttctaaaagcggtttctccaaagagccactgttcactccaacgcgaattgggatattgtattcctttgccttatcgacaaccgcctgcactctgcttctgtcaccgatattccccgggttgatccggattttatccgcaccgttttcgatcgcagcgatggcaagtcggtaatcaaaatgaatatccgccacaagcgggatgtggatccgcttcttaatctcccggattgcctctgccgcctccatcgtcggcactgcacagcggatgatctgacatcctgccacctctaatgcaaggatttgctgcacagtcgcttccacatcttctgtctttgtatttgtcatcgattgaatagcaaccggattgcctcctccgatctttacggttccaatctgaatcacttttgtatcttctcttgtcatggtcgttactcctttccgtcccatttgaaaaccctctatgaaaattgctgcattctcttagagggcatgttcttctgcactattttttatcaaaaaccaactgatctccgtactcccgctcggtaagtgtcagctgattgttctgtacactgtaatcgtatgtggctgtgatctcactcaatgctgtttccagcatatcggcagtatattttccttccgatttttcttctgcttccagaagagcttcctcatctgccttaaatgtcaccgtcttgctatccttatccaaaaggtactccatgccgatcgtcatcttctcgtcttcgaaaatttcttcccagtcaaccagaagtgttccatttcccttgatcgtcagcacaagctgctgctcggtgcttttccatgtcccttccagcggattcccggtaaacatcttaaacaagaaaaatgccccaatcaaaataattagtacactcgccgtggatatgacaatcctccatgccatactacgtttctcttcattgctctttgcgataaacatgctaccccttccttccctgcaagtcattgaagtatctcctactgtcatctgaatttctcatcactttccacaatagaaaaattgcttctcgcccttgttgtaagtaaattataagttgtttcagaaagagtgtcaacggataatgcgaaagccttttatttcctcttcatacttctgatcttttccttttcttctttccccacccggagtgattctgtgattttctgcaatgctttgttgtaggtaaaatcatccagcttatttttcatgagatactgcatcgtcagtttcggatgctgcacataataaaccgatactgcccatgccactgccattttcacatagtaatcttccagtgtgatctcatcaaaatatcgaaatgcttcccacagatagctttcttctccaaaatgatctagccccatgaccacgccgaatctgactgtgtaaacctgatctgactgcatgcactgttttacaaatgtccacatcttttctttctcatgctttgcaggttttaaggtgctgcaaaagctgtcacagaccgaccagttatcaatctgtggaagaaaatcacaaatccatctatgccattctttccactccatcttcgcatatccgatcacaagtccccgaagcatcgtctcctcgaatgtcttctccacttcagatttctcttccaaatacgctctccagtctccctttacgatctcttttgcaagtttcctgagatgcggaagtctcacaccgcgaatccgctctgcttttacattcgggatcaaccgggcagaaaactgctgataggaaggttctgataattcctcgattctttttctgacttcttcagccgtcatcatctttttctccttcctacgatttttcattccctttttccagtgctgccaaaagtgcaaggaaccgctcgccatatttctcatatttcttttctccgacaccggtcacctgaagcatttcttcttttgtcttcggatgaagtatacacatatgtgccagtgttttatcggaaaatacaatatacggcggaaccctctcttcttttgcaattgcaagccgcaattcccgaagctgtgcaaacagtgacggatctgctccgcctgtaaattcggaggacttgcgcatctttttttctttcttttccaccttgcgctcttttgccgctttcataaagacttgttcattttcttccaaaagttgtctggatttttcattcagatgaagtaccggatactcttcttttgtcagcaacagatattcatttaaaatcaaatgattcatgatctgccgcagacgaaagaccggaattgcttccatcgttccgtatgtttcattttcatccatgtgatattttaaaatctttgcagactttcctccatgaacggtttctatgatcacgttgatcccataccgctgtccacttgtccgcacacagcttaccatcgcctttgccggagcggtcacatcgatttcctcaaactgggtcagacagtttgaacaattcccacagtaatttgccccatattctccgaaataacgcagcatatactcccgaagacactcgtttgtaaaacagtaataggtcatcttctgaagccggtcccgctcccgttcccggatcagttctgccgtctccggatcaaattctgactgctcccctgcttgctcgataaaaaactgatttgtgatcacatcctgtccggaatagagcaaaatacattcggatggcatcccatctcttccggctctacccgcctcctgatagtagctttccatgtttttcggcatattataatggatcacaaaacggacattcgacttatcaatccccatcccaaatgcattggtcgccaccatgatctgcttccggtcataaataaagtcctcctggtttcgtctccgctcctcgtcaccaagtcctgcgtgataccgtgtcacttctaacccttctttgattaacttctcacagacttcctcaacaaccttccttgtcagacagtaaatgatgccgcattctccttcatgctctctcagataagctgtcactgccgcaaacttatctcttggatgctctacacagaatctaagatttacccggtcaaatccagtcgtgatcattgcgggatcccgcaggttcagcagtgcgataatatcttcttttacttccgctgtcgccgtcgccgtaaaggcactcagaaccggtcgtgtgccaagatagttgaaaaattccgcaatcttcaaataactcggtctaaaatcctgtccccactgcgatacgcagtgcgcctcatccacactcaccatcgaaatctctgcctctcttgcaaatcccagaaaactctctgtcagaagccgttccggtgccacatagataatcttataccgcccttctttcgcatagcgaagtgcagtcagatactgtccctgcgtcagggaactattcaaaaaagctgcgtgaacacctgcctgattcaatgcggcgacttgatctttcatcagagaaatgagtggtgaaatgactaatgtgattcccggcatcagaagtgccggaatctgatagcagagtgatttccctgccccggttggcataattccaaatacatcccggccgttcgtcatctgttcgatcagaaattcctgcccctcacgaaaggaatcgtatccgaaatagtgctttaaaatatgtaatgcttcttcttttttgtacaaaatcaatttctcccttccaggctctttacattttctatcattatgatatgatacaaggcgaaaataatcaatgtttttaaggagaacgatctatgaatccaatgcaattactacagattagaaatctttggaacggcttcacctccagacatccaaaatttccgaaatttatgaatgccgtctatcagaatggactttgcgaaggaaccgtaatggaaatccagatccgcacacctgacgggaaagagtttgcctccaatttgaaagtgacaaaagaagatctggaacttgttcagcaaatgaggtcgatgcgttaaatcgacctcatttttcactaaaatcccatctcttcatagtcctctttcataaaccggtgatagatcacatgacttccttcaaatttgacacaataataatatgcatccggtttctgatctgcaaaatagatcagcacatcgaattcactgtccttgatctgctccacaacggtatgattggaatacctttcacagatttccaacaatttttccaaagtacatccatgtacagacactgctgtgatccactcctttaaaaatggattgtccggcacctgctcatgtacatagactgccccttctggcggaacacagagacagaaacggtcttttttgtgagatactgtaacatttcccaaatgttctgtatgccctccaaaccattccagctcctgctgcagtttttctatagaaagctcttttcccaacaaccgaagtaaggaatccaccggataatacagacgaatcgtctccttctgatacccaagcttcatctgctcctctttgatcaagtcaattaggttttgttccagtttttgatattcctgctccatattttttatccccctttcttttcttaccggtattcttatagtctatattgccccgaaaatgctatttgacctttcgtccggaaacatacttttctgtaatgtgtcggtcatcagacagatagatcatgcgctccaggcggtcccgcacggtcagttcctgcggatgtgcaatgttactgtcgtctaaaatcagtgcatcaaactcgtatccttcttcaaaacttccaacctttccaaaaaacgccccgccgccttttgttccaagatagaatgcctcctccacagtcagcggcttctgtgtatcatccacaagtctccagcgcattttagaacattggatcgcatctgccatcgcccggaagatcgacgtactgtatcctgctgccatatcacttccaagcccggtcgggattccctctgataaaaatcttctcactggtgcaatccctgaagaaagattcatattggactgaggacagtgcgccacatatacctgattgttcttcattttttcaatctcatcttcttccatccagatacagtgtgccataatagtagggcagtccccgccaaatagtccaaactgttcatatgcctcgctgtaatttaacacattcggacaaagctctttcacccacgcgatctcacctggattttcagataagtgagactgtaccggcagttttttttctctctgtagctctgccagccctcgcatcagctcatctgtgcaggaagggataaaccgaggtgtcaaaatcggtctgacatgtcggaaacgtccgtccgtctctgcaagccatcttttcgtttcttctagcgatttttctgcacttttttcttccagatccttccctccgtttcgatccatattcacctttcccacataggccgacaacccggatttttccagaagttccatcagaatcttagttccgtccacatgcattgtcgcaaaaatgaccgctcttgtcacatcacttttcttcagttcttccacatacatcgtatatgcccgtttcgcatacacttcattggaatactttgcttcctcaggaaacgtatgtgtattaagccactctaacagctccagatccataccaagtcctcgaaatgcatactgcggcgcatgcgcatgaagatccaccatccccggaacaatcagggcatccccacaatccttcaccggaagcccctgatatttctcagggatttccgaaaatacccccgcactctttccatctacacaaataacatactgttgctcggctacccgcagtctgtccatcgtctcactataacaaatattcccttttaaaataaaatcggtcttcattttgtttcttcctcactttcccaaacattgttgcccgaagtctgtcactccattccgacaactcctatctttttacgcagaaaatggggcgatacaaaaagtacactgcctccttgcatctccccacttatagtcaactattccggtagtttgtagaaacgtccaaccaatcttgaacatatataagttctgcctattgctcctttattataaaagattctgttccggaagtcaattcgccacaaaaacttgttttcctcttcataatatcttgccaaattttagacctttaaaaatttcataaaatattcccttgtctttttcttctcacttttctagaattcctctgcttttttgaaatttcctgcctgaaccggcagactgaatatgaacaatcctgatactgactttcttttcttgtttgaaaaacagtatcaggattttttgatttttatcttgtgaaatgcattagatatgctttagattttactctttctgaccgcattgcctaccttttacagactctgcttctgcgagaaatgcttccatagtatctgactttgccgcaagcaccagccagtttctcaatacttccagattttgctctgtctcaatctgttttcggaacatatcaggaatcctgcctttgcactccaaaatcgtacacagcgaaagtcttgcaccttccgctcttccttcttctcttccctcaattctcccttcttttctttcgtctttcagcatctcttccaaaatcataaaacgctcctccatctcccggtctctcttgatttctcgaattgttctctgcagtttttctacatagtcatcgtgaaaattttgttcgctctcctgcagtcctgcttttacaaatcttaaaaaggtaacaagttcttttggaacttcgtcttcattttctccatgcgtactcagaaaaatggtacatcgtccatcctgcagtttgctttctttacattcttggtactcacttgaaaatgtgtatcgatatttcttctgcccaaacgggtcaaagtcacatagaaaaataacataagtatccggaagttcttcatactcttccccagataccagcagctccatatcaatctgactttgataatatctgcttcttctcccaagtgccggctttttggaaacctgcatttccacattatagtgggttcgttcttcatcatttgcatagacatccagacggattcccttatactctgggtggtagatcatactcttttccttactgacaaccacctctgagagtttcgtctgaaggaccatctccaaaaaatctttgcagttttctggcatcgtcatcactgcgccgaacataaagttatctttgatcgtaagttcttttaattgtttcttcatcggttttcctccattatgcagaggaattctatgaaaaaattataacatgtccattctgctttctgcaatctctattcagcctttacagttcctttttcaatgttttcttctacaattgctttcacgcattcccacactgtttttgatgtctcttccattttttcattccgtttgtagatctgtgaccgtttcaccccatgttctgcccaactttttccaccagatgcgtgatttaaaagaagtggctggaaattgtcaagaaggtgtgcatactttgcatcgcccgtctcgtatgcctcaaattcttcccagagttcccgaaaataagcgccctgatctgccggtaggattccgaagatccgatctgccgccttttcttcacgcgctctctttgttgctgctccggcgctgtcatatgcgtaagtatctcctgcgtcaatttctacgagatcatggatcagtaccatcgtcataactttcaaaagatccacctcttcctctgcatgctcctgcaaaagtactgccatcagcgcaatgtgccaggagtgttccgcatcattttcttttctctcaccatcggcaagataggtctgccggaatatattttttactttgtctatctccatcaagaatgcaatctgctgctgtaatctttcatgcttttccatcatctcatcgttcctttccttctcgtgatcatacttgttattactatatcacactctccctttttttcacatctccaaatcacagcaatcaaaccatcaagccatttcaaaaagcaaaacagggctgactttctttacctcaaaaatatgttctccccacacttgacaaaatgccataatatttttcaaaaactacttacaaagcatccgtattccccctgactcccgtcaaaaaagaaaactgtcatgtactttctccaactgttgtgtcctttctttcaacaatcagatacctgccatgacagttttcttacgattttttattgtctgttatgagtctttttgttttccgctctgttttatgcatttttcttcacgcgttttctacagcttgtgttccttcagccattcgcttgcatgtcctgcaatctcgcggatacatccgtcttctaccggagaggcgagtcccacacctgctaccagcccgaggaatgtatctgttccgccgcgctgtacaaacattttatatttttcccacgcctgttcccagtctttttcaatctcaagccagaactgtaatgcaacggtctgtgcaaggcagtaatcaatataatagaatggtgtcagataaatatggttctgtctttgccatcctgcacctcttccatagaatggcattccttccagatcaagatatggacgatacatcttttctaatttgagccatgcttcgtttctctccgctggtgtcatttccggatgttcatatacaacctgctggaaatggtcgacaagacatccatatggaatgaagtttaaagttccctctaaatgagacacttcgtatttctttgtctgatgtttaaagaataattcataccatggtgtcgcaaagaattccatcgacatggaatgtgtctctgccgcttccatcgacgggagatgcatatcgatcagctcgatatttttctctgccatatattctgcaaatgcatggcctgcttcatgtgtcaatacatcgacatctccggctgttccgttgaagtttgagaagataaatgggcatccatatcccggaatatctgcacagtagccaccggtagcctttcctggttttgcaacaacatcaaataattctctgtcaaacatcattttgatgaaatccgctgtctccggcgacatctctgtatacatctttcttccggcttccatgatctcatcataagttccctgcggaatcgcatttccatccgggaactgcaggctgtcatcgtagattttcagatcctctactccaattctttctgcctggtttttcttgatctcacatacgatcgggacaagatctcttactacctgctgacggaagtctgcaattgcctccggcgcatagcagtttctctggcgacggacatagccaagttctacgaaatttttcattccaagacggtgtgcctgctcggtacggttcttaacaagcttgtcaaaaatttcatccaactctccttgatgttcatcaaagaattttcctgtagcctcatacgctgcttttcttacttctctgtcctgactctgcatataaggtcctaactgagacagattgcatttttctccgttgaactcaatctgtgcacttgcaagcagtgactggtactgtgtctgcagtgtactttcttcctgtaacaattccgtaatctccggagaaaatcctttcatagaaagttctagattgataaataacactttccccagcttttcttccagttcttttctgaacggagatgctaacaatactttgttatacttctgtatctcctcttccagcattggtccgatatgatcattgtattctctttcctttgcgtaaaattcatcttttgtattaatcgtataacgaatatacacgagggagtctgcagtagcgatttctttcttgacatcattcatctcatagactgcctgcacctgttcttccacagactgtgcatgtttcaatttctctgtgatctcctgaatcttcttctttgtctcctcaagatcaattcttttgtaaataaattcactgaacctcatcacttttacccctttctggacccttattttataaaagagcataccggattttctccgcttaaatgggactattttcctagtctctataaaatcattgcctttttttattatactatacttcttctctcttttccagcagaacaatttctttctcggatccagctctgttgtcaaaattgcagatcaccttccactctttgttaggattgtaatcgtcacctgcgctcctcccattgcatccgaattttctaaacataaacgccctccttgctgctcaacaaacctgcttgcaattgccaaacccataccataatgattgcgctgtccgcgacttttatctcccctgtaaaactgttccgttcccctaaacagctcctcttctgaaaatccaggcccatcatcttctgtgacaaatattgtttgttcttcctctatgcagaccgtaagccggatccttcccccttcctttccatattcgacactgtttgcaatgatattcatccatgcccggtaaatagattcttcttccatatccaacacaaagttttccaaacaattttcaggaatttctctcacactgactgtcatctgcctagtctttgcaagtgtgtctgcctgcttttttattttttctgtaaatcgtaatagatctgtctttgtttttgccgtcgtctgatttctttccgaaagcagcatctcctgaagtacttgaagataattttctattgttttcgtctcttcgcgaatttcttcggcatactcttttacttcctcaagtttctccgcttccagtgtcaattctgcattcccccggagaatggtcagtggcgtcttaatatcatgtgcaagcgccgccatctgctcccttcgcacctgctccatattccactgtctgtgcaacgattgtctgagtgcttccctcatctgatccatggattgtaacactgcatcgatttccagtacttttgaagattttctttcaaaattaagttcctgttgactgatattttcagtcacctgctccaacgaagaaatttcccgcgaaataatccttccaaacctttttgccagccatatgagatacaagaaaaataaaatgactgtcactcctatcaaggtccagtctgccgccggaaaatactgttgtaaaaatttgttcgtatagctggaaaccatgcggtacttcacaatgcatacttctctttccctgtcaaaacttcgaaaataatacccctcttttcctctctctccttctctataaatctcccacgcgtcttcccgctcttctttttcaaatgttccataaaggtatgttccctctcgatcatacactccgtaccgacatgtctccggaatcagatcttccgtcacccgctctgctgactgaatctgtctgacacgtcctgtaagcattccttccgcataatttgccggaagaatccatcctgtctctatccctgcggaaaacagcaacagtgcagctgtcaaaatcaccactgcaccaatcataacccagactgcataccggataaaaaaggtatgcagtcgtattttcctttttaattccatcgataccccatcccccagacggtctcaattggctccgcctgtacttttattaatttcgctcggatatttttaatatgttctgtgatcgctgaggcgtcactttctccttcatagccaaatactgcctcatagatctgttcccgcgacagtgtctgtccgtgatgaagcgccagatattcacaaatctgatactcactttttgtcaacggaactttctgatcttttgccatcactttttttgcctgcatataaaaatgaagcccggataccgcgaacacctgcttcttctcccgctgttctcttcgcaggtgcgcctgcaccctcgcccgaagttctccaagtccgaacggtttgcaaatataatcatctgctccggaaccaagtcctgccatcagatcttcctctagtgtctttgctgtcagaaatacaattgggcaatccacagtttctcgaatctctctgcacaaagtaaagccatcgatgccaggcatcatcacatccaataaaatcaagtcatatcgggacaactccatctgtcttaccacgtccccatcctggacagtctgtacgatatgcccatctttttccagtgctttccttatgatctggagaatctttgcctcatcatccactgcaagaatctttgccatttttattccacttccttctttccttcatagtatgaaaaccagacaaaaaacgccgttagaaaagcaactgtcatccctgcgctcatccacaccccggttcttagatctgacgttatttccattatgaatttctccttataatatatcatatatctcaacagttgtgtcccccaggcaaacggacaatacatccaaattccctctcccattccggtaagaaacagcgccgaaagcatactctctacaatccctgcccctataacaactcccttatgccactttagactcacaaaaaaatggatgacataagtagcaatctgcgttccaagaagtataaaaactgactccacagtaaaaagcagtaactcgccactgaaagattctccagaatacagatagatccctaccagataacttccaagcgccagcagtgttcccattgctccaagtagcagcaatgccaccaatttcacgccccctgcacggcactttcctgctactcctcctaagagcacctgcatatttccggcatccacttccatctctgttccaagcgtacacacaattccgctcagtgtcggaaatgcaagacttaaaatttccagaaactccccgatactctttacattcatgtccaacgccccaagtcttttataataccagaggacaattcctgttccaactatcggtaccagtatatgcatccagaaaagtgtagtccgttttatttttacaaattctgcacggagcatttacttcatcccctttctctcatatacccggatactaatttctgtgacaagaataaagcataggcaagtgactacaagtcccggcaaaatacttccccatgacagaagttccggggaaaatgtgatgtttcccggctctgccggaagcccatttggcaatatttttagtaccggacacatcagacgcgccggaactgcatatggaatcagccacatcccttcggttgcaaaattagcactcaagataatatttgctaccatattgatcaaaattgtggctacagttccgcatttctgctccagaagaaggcaaagtggaatctgccatgcgtatgttagaaacagtaacactcctgcaaacagcgcatgaaaaatcgtaatggtgtctgaatattttgcctggaatacctgccctgccacaaacgtcaaaatacactgtactatgcatgccaaaaacaaccacagactgcaataaaaaatcttgatcagccttaccctttttagtgacaccggaagtgtaaacaccgccttttcgccaagctttctatctttctctccgcagctgcaggaaacaatggaaagcattgccggaagcaaaaacatataccaccaattaaaactagtcaaaactacatacgctggagacaacttaatgccaagcagcaatgtcaaaagcggcgccacaagaaacgctttccccaagaaagtatgtcggtacttcatctgttctgcacaaagatcattccacatctctactactcctttctgcctgccccggcaatctccataaacagactctccagcttttcctcatgaggcatttctccctgatagcctaacactccatcggcaataattccgatatcatccgccacctgagacacttcacttaaaatatgacttgacacaatgacagtaattcctttttgtggaaattcctgaatcatctgtctaagatcctggattccgattggatccagaccgttggtcggctcatccaggatcaaaagtttcggatgatttaaaagagcgatcgcaagcccaagtctctgcttcattcccatagagaatttccctgcacgtttctttccagtctgtgtcagtccgacgatctccagcacctcatcaatcctttcctcgggaagacctagcatccgtgtacgcactttcagattttcccgcgcagacaagtttccatagattgccggcgattcgatcagagaaccaatcttatttaatgacttcctgctccatacttcgccatccaccagaatactcccctgagtcggacggacaattcccgcaatcattttcaacagtgtcgattttcctgccccatttgcaccaagcaggccatagacggtattctcccgcacctgaatagagactgcattgactgctttctgctctctgtaaactttactaagttcccttgtttctaatatatttttctgcatttttttacctcctgtaatgaatttatcttcattgtaaaagccaattctaaggaaataataaggattttctattttttattccagcaactagtcgtcatccaatcataaaactgaatgaactagtaccaattcgttatcaaaaatgctataatattaaaaacttttcaccgatagaatgtgcaacttttccaaatcaaacaagcatcgctatcgtatatttctgctgatcactcatacaaatctattactgaaaggagtttatagacatgtttaaaatttttaagaaacactcgaaaactttatggatctctatgcaggatgtgcttgctatcataaaaagtgactatgacaaatcctggccatttgagattatagaattccgctatgggggcacaacacaccgcatgggcgcctatgtagaagagttagacgaaaaattttataataagattaaacaagaagaaatccatttcgtgtttgatgaacaaacttacacttccttcgaggaattcgtaaagtctgttcatataaatggaatcccgatcaccgatgtgctcggtccaattgaagtcctgcaggcagggatcgtcaacggagaagcgatgttgagttctccatggggcgaaaaaagacttagtgcgcatgcgattgaaaaagaataattttctgcttgacaaacattcctctatcgtttattttaaacttgaacaaggttcattttagaaggaggtttttatgaatccaacagttacttcaaaagaagaaatcattgccgcctgccagaagattgcaaaagagcggggactggaagcaatcagcatgcgctcggttgcctctgaatgtggcatggcagttggttccgtctacaattatttttcctctaaatcagaacttctctgtgcagcgattgagaatatctggaaagatattttccacatgtctgcaagccagtgtgctttttccgattttgtagaatgtcttaactggctttttgacagtgtacagagaggaagtcagatgtatcctgaatttttctcccggcatgcaatggtttttgcttctgaagatcagaaagccggacatcagatgatgcagaaatatttccgccatttagaggaaaaccttctgaacgtactgcgcagagatccaaatgtccgggaggatgcatttgacgaagtgcttactcctgaattatttatcagctatgtactggaattattcgtctcctctgtatttcattttcagaaagactaccgcggaatccttgagattgtccgccgctgtctctatgcccctgctcactaactgctatgtttttgtgcagcgggaactgcaaatggaaagagtgagagtttactatacatgaaactgaacatcgttcatcattttctttcacaggaggtatgcttatgaaaattaaaaaacgaaatctgctgcttctcgcagcaatcgtctggatgattgccggatttaacatcctgcgcatcggaatagagacttatgtagcttacaaaagcgtgatcaactttatactttcgcttcttgtatttcttttcttctggttcatgatcttttgcaaactgactgtaaagcacacagaccgtattcagaattatcaggaagagcgacagttttttcttaacttttttgatctgaagtcatttctgatcatggcttttatgatcacatttgggatcacgatccgcacattccacttattgccggacagatttatcgctgtgttttataccgggctgggcgcggcgctgtttcttgcagggatcacttttggtcggaactacatttttttcaaaaaaacagaaactgcaaattagctttttcacatattatttttctattaggaggttctattttatatgagcacagaaaagcacacacacattaccacagtgaaaacattaatgaccgcttctatcatctattttttctgctccatggcaggaggggttttctaccgagaatttacaaaactctttgatttcaccgggaaaacaactcttggcgtgatacacggacatctgctcgttctcggaacatttttctttcttcttcttgcagtgctctgcaaatttactgcacttggagaccaaaaactgttccaaaaattttttctcatctataacattgcattccctttgatggctgtcacgcttctcatacgcggaatcgtgcaagtaacaggctatccaatgacacgcatgttaaacggtatgctctctggatttgcaggactttcccacattttccttgcagtagcactttttctgttactgctcgctgtaaaaagagaactttgtaacgaaagcgccaaataatttcttgcgaaagttctccttgacaaatgtaactttttctcttatcctttagcaagggaatgaagttctcccttagtaaatactaaaaccgccaggtggagcgtgcctcccctgattgctgatgacttctgctttttgcaggactcatcagcttttttattacatcattttctatcggaaaggagaaaaacaaatgttatttagtatttctgttctattgctgctaggcatgtcactcggtgccctctgcaagaagctacaccttccggcgctgaccggaatgctgatcaccggaatctttctcggtccttatgcacttgatctgattgatgcttccattttatccgtatccgctgatcttcgcaggattgctctgatcattattttaatccgggcaggattgtcattgaatctggatgatttaaaaaaagtcggacgtcccgcaattttaatgtgctttgttcctgcctgctttgagatggcaggaatgatattgcttgccccaaaactgcttggcatctcactgcttgatgcagcgattcttagctctgtcattgccgctgtttcccctgctgtcatcgttccgaacatggtgaaacttatggaggaaggctatggcacaaaaaaaggaatccctcaactgatcttagccggggcttccgtcgatgatgtatttgtaatcgttgtgtttaccgcctttaccagtcttgctgccggagactctgtgtccatcagaagttttgtcaatattccaatatccatttttctcggaataatatcagggcttggaatcggactgctcctttcggttttctttcaccgaattcacatgcgagatactgcaaaagtaatcattttcctctgtatctcttttttgcttgtcacactggaagatcactgtgcaaatgtaattccttttgcttccctgattgcggtaatgacaatcggtgtctccctgcagcagaaaaatcaggcactttccctccggctctccttaaaatttaataaactatgggttggagcagagatcatactctttgtccttgtcggtgcaactgtcgatcttcgctatctgaagtcagccggaggaaccgctgttcttctgctcctccttgttcttctctttcggatgtcaggtgtctttctctgtcttgcaggaacagatcttacaaaaaaagaacgacttttctgcatgatagcctacactccaaaggcaaccgtccaggcagctatcggtggaatccctctcgctcttggactttcctgcggaaatctcgtcctcaccgttgccgttgtctccatactactgacagcaccgcttggagccttctgtatcgaaaacagttatcaaaaacttttaacccattaatctttcattattgaaacgacaaaagtccggaaaacctgatatcagttccaggtttccggacttttgtataaaatattattcgagctcaaatgctcctgtatataactgataatattttcctttttgtgcgatcaatgtctcatggtctcctctttcgataatatttccatgctctaataccatgatcacatccgaattccgcacagtggagagacggtgcgcaatgacaaataccgttcttccttccatcagcgcatccattccgcgctgtacgatcgcctctgtacgtgtatcaatcgaagaagtcgcctcatccataatcattaccggaggatctgcgactgccgcgcgtgcaattgcaatgagctgccgctgtccctgagaaaggctcgccccgttttccgtaagcggtgtatgatacccttctggaagacgcgtgataaaatcatgcgcaccggcaagttttgcagccgcaatacactcttcttctgtcgcatctagctttccataacggatattgtccataacagttccggtaaaaagatttgtctcctgcaaaatcaccccaagtgaacggcgcaaatctgcttttttaatcttattgatgttgattccatcataacgaatctttccatctgcaatatcataaaaacggttgatcagatttgtgatcgttgtctttcctgctccagtagaacctacaaatgccactttctgtcccggctctgcataaagtgtgatattatgaagtactgtcttttccggtacatatccaaagtccacatcaaacatccggacatctcccgttaactttgtataagtcacggttccatcttggtgtggatgcttccatgcccacagtccagtatgttcttcacactctataatctctccattctcttctcttgcattgaccaatgtcacataaccttcatcaacttctggctcttcatcgatcaatgtaaaaatacggtctgcacctgcaagtcccattacaactgaattgacctgatttgacacctggctgatatttcccgcaaactgctttgtcatatttaaaaacggaacaacaatgctgattccgatcgccataccggaaatactcaggtttggagctttagaaagaagcaaaattcctccagtcaacgcaacagcaacatacaaaatatttccaatatttcccagtaccggcatcagaatatttgcaaacttattggcattttccgcatcgtgaaacaattcctcattgagacgatcaaaatctgcctcgctttctctctcatggcagaaaacctgtacaactttctgtccattcataatctcttctacaaaaccttccacttttcccagtgcgacttgctggcgcacaaaatattttgcagaatttcccccaactttcttcgttacaaaaaacatcaggatcacgccgcatacaacaacaatcgtcatccacacactgaagtacagcataattgagaatacggtcagcactgtaatagaagaaatcaaaagctgcggaatactctgcgataccatctgacgcagtgtatcaatgtcgtttgtgtaatagctcatgatatctccatgattatgtgtatcaaaatatctgactggaagatcctgcattccattgaacatttttacacgaagctttttcaaaaatccctgcgtgattcccgccatcatctgggtataagtgatcgcggacaaaatggacaagatataaaatacaagaagcagccctacataatagaaaacttttccggaaacagcatcccagtctccgctcttccagcttgtctctacgatcgcgatgacattctgcatgaaaatagctggaatggaagagacaactgcactgaaaataatacagaacagtacgatcggcatcttaaccggataaaactcaaacaatgtcttgatcagacgtcccagtgttcctttttttgctctgcttggtcccttatttttcatcgtcatcacctgccttattctgagatgtatatacttctctgtaaatctcattgtgtttcagaagttcctcatgtgttccgactgcattgatcgtaccgccgtccatgacaatgatccggtctgcatcctgcacggaggaggttctctgagcaatgatgatctttgtcgtctccggaatgaattcgcggaatgactggcggatcaatgcatccgtcttcgtatctactgcactcgtcgaatcatccagaatcagaatcttcggtttctttagaagcgctcttgcaatacagagacgctgtttctgtccaccggacacgttcgttcctccctgctcgatatgggtatcatatcctgccgggaactgtctgataaattcatctgcctgtgccagtttacatgcctcgatcagttcctcgtccgttgcttccttatttccccaccgaagattttccttaatcgtaccggagaatagaatatttttctgcaatacaacagatacctgatttctcaaagtctccagatcatactccttgacatcgcggccaccgactttaacacatccctccgtcacatcatacaaacgggagattaactggatcaaagaggatttcgaagacccggttcctccaatgacaccgatcgtctcaccagatttgatatgcagatcgatattggcaagcgccatcttctctgcattttttgaatatttgaaatttaccttatcaaaatcgatcgaaccatctctgacttcataaactggatgctccggattcttgatcgtgctctcttcggaaagtacttccacgatacgtttcgcagactcgcttgccattgtgatcataacaaaaaccatagaaatcatcatcagactgctcagaatctggaaactatatgtaagcagtgcagaaaactgtcctacatccagatcaagccctcttgatgagatgattacataagacccgaaagaaagtacaaagatcattactgcatacatgcaaaactgcatcagtggattgttgaatgccaaaattttctctgctcttgtaaaatcctgacagatatcatctgctgccgccccaaatttttctttttcatattcttcacggacataagatttcacaacacggattccctttacattctcctgaatagaattgttcaggcgatcatatttcttaaagactttccgaaacagcggcatcgtcagacggatgatcagcgccagtcccacaccaagtaccggaacaagaatcacaaagatccatgccatctttcctcccataataaatgccattgtaaaggaaaaaatcaacatcagcggacatcgaattgcaattcggataatcatcatatacgccatctgcacattcatcacgtctgtcgtaagtctcgtcactaaagacgaggtagaaaaccgatcgatattcttaaacgaatacgtctgaattttgtagaacatatcctttcttaagtttttggcaaatccgcaggagccggtcgctgccgctgtccctgccatcacaccaaataccagcgaaactgctgccatcacaagcaggatcgatccatatgttgcaatcacggaaaaactgcatccagccttaatttcattcacaagctgggcgatgatgaacggaatgatacattccataactacttccagtgatacataaatcggtgctttgatcgaagctgccttatactctctgatacattttgaaagttcttttatcacttcacattcctcctgtttcctaattttcgtaaaaacaaggtatctcaacttcaattgttagataccttactttcttattataacactataaaatttaatttgcaaggttcctaacattgttttcttgcatcttttttgccttcgatttcaaaaaaagaaggcctgcatcctcgcaatcattcccctccagcagatacgtttctttccactttcctgctatctgaaaattgcatgcggttctgcatgacctctctttatttttttattctcctccgagtttattggcaatcagccatccaagtccgaatgtgattactccggctccgatcgtaaatacggaaacacctgaccaattcgtcttcatcagaatcgcaatcggtgatgcgacgatcagaccgataattccataataagcatgaatctctgcttttgaaaaaatgaattcaatcaattttgcaatcacaccgattccgatcagcacaccaactccaaacggcgcaagtacaccaactccctgcatcagtcctgccatatcgaatttcacaagtgaatctacaaataaattaatcgtctttaaaattacatcataatatccaagcagcatcagcatcatcgaaccactgactcccggcacaaccatcgttgccgccgcaacaacccctacaaagaataacttaattacattgacaatcccaaatgtgacatccgctgtctttcctccggtctctccaagcatcgccatcagaatcacgattgcaaaaaagacaagaaatggaattattttcccgattgtgactgaatgtcctttcaccttctttacaataaatggaagacttccaatgatcagaccgcaaaacgcaaagttcgtcgggattggatatgtatcaagtaagaattcaaacaatttcgacaatacgacaattgcaattcctgccccagcaaaaattgggatcagaagcttcatactttgtttaaactcgctcttcaagtgggtaattgaatgaatcagcttgtcatacagtcccatagcgaccatcattgttccaccgctgactcccggaatgatattcgcaattccgacaaccattccctgcaatatttgtttcagcatacattaatctcctttccatgcactctgctaaaaaatttagcataaatcctctcttttttcaatctttctcttttgatttacaaaaattttatttcttttacggactttcgcgtgcttctctaggcttatctctgaaaatactgctttgcaagttcctgaaatctcggcagcgcaccaataattgtctcatatgccacacagtaagcaatccgcacataacctggacacccaaaagaacttcctggcacaagaaggatattgtatccctttgccgcctcacagaacgctttctcatcttcgattggagatttcacaaacagatagaaagctccctgcggctttatacagctgaatccacactgtctcagcccttcataaagtgtttcccggtttctattgtaataggtaagatctgttttttctctaatacatttagcaaccaccttctgaagcaacgtcggtgcattgacaaatcctaaaatccgatttgccacacccgctgccgcaatcacatcacaactgtctgccacttctgaaggaatcacaagatacccaatccgctctcccggaagggacagagacttactataagaatatgccacaatcgtatttttataatattttgtcagatacggtacttccactccatcaaaagcaagttcccggtagggttcatcggaaatcaaatagatctcagtcccatattctttttgcttctcctccaaaattcgtgccatttcccagattgtcttctctgaatacacaacaccggtcggattgttcggcgtattcacgataaccgccttcgtcttcggagtaattttctccgcaaattcagtaagctttggctggaaagtttctgtgtccggtgagatctccacaagtacaccatccacattggatgtgtaacttctatactcaccgaaatacggtgcaaaaacaatcacttcctcctgcgggttgataagcgtctttaaaatcacattcaagcctcccgctgcaccgactgtcatgagaatattttctgcagaaaactccgtctgaaatcgctcattcaatgactctgccactgcctggcgtacctcttcatatcctgcattgctattcgtatagccatgaagttccagcggtgcctcttcctttacaatggaaataagtgcttcctttaccgcctccggtgcttccacatttggattgccgagactgaagtcaaatacattttctctcccgtacagctttgcaagacggtttccttcctcaaacatcgcgcggatggcagaactattggccaccatccctttcatcttctctgcgatcatactgttgcctccctctttgtcacagttcctttttccacaagaaataccgggcggtacgacagttttgctttgcgaagtccctctgccccagtgtcttcctcacggttaatgtatttatatttcatacactcatgttccacaaactgctgattgatcatcggataagcaccttggatctctgcaaatgctttttcaatatggactacaaatgtatcgtcactgacttcctctccaagggtaaatgcaacaacctttccattcactctcagaagccccccggtcagctccagttcttcatagagccgcagagaattgagtgttacacacatctctgcatttttctcttcatctgcctcacatccattttcaatccgccattgcagtgccatctgaaagcactcttcgatattttcttttgtaatcttttcatacgaccaatcttcatttacttgtttgaatttattgatatgatttcgcttaccgtgaagctttttgccagaaagtgtcgccagtttctcagactcgtagacataatctgcactgtctctgtcgtattcgatttgaaactgtcccggataccactcttccagctgtgcaaagttctcttctgtgacacagtacatcataaacggatacccctgttccctgctgtactccatcaacacttcgatcgtccgcttgacatcctttggatctcccaccgggtaggcaaaggacaatccattttcctttgaccgaaagacaaccgtattttctaccatcgcatagcctacttgataaaacttcgcccacaggtacacgttaacaaacgtgcgctcacagcttcgcgatggatactttctaaagtaagatgtcaaaagttccttatcctccaaagtcggtcttcgaaagtctatcgttatcattttattctacctcttctcaaattttgcttttctctgttttcctgctgccattgccttcttcgcacttctttaaaagcgttttttcaggcagtgtatctatttctagcactcgatcccttttcggaactgcatctgataaaggtcggcatacacgccgtctttctcgagcagctgctcgtgagttccttcttcctcgatgccattctcagtcagcacaagaatccgctttgcatttcgaatcgtagagagtctgtgcgcgatcacaaatgtcgtacggttctttgccagacgttctaaggactgctgcacaactttctcactctcattatccagcgctgatgtagcctcatcaaaaatcagaatcggcggattctttaagaatacccgtgcaatagacagacgctgcttttgtcctccggagagtttcacaccgcgctgaccgatatctgtatcatatccttccggaaaactcatgataaattcatgggcatttgcatttctcgctgccataaccacttcctcatctgtcgcatctggctttccataacggatattttccataatcgtccctgcaaacaggtaaacatcctgctgcacaattccaatgttatttctcaggtcatctaacttcatatcccggatatcaatgccatcaatccggatagcaccctctgacacctcataaaaacgtgggatcaggctgcagattgtagtctttccgacacctgatggaccgactaatgccatataatctcctgcctccacatccagattgatgtgatccagtacattttccgtactgtcctcataatgaaaagatacattttcaaactcaatctttccttccagatactccacactgactgcatcttctttgtccttgatatccggtgcgatcgacaagatttcaagaaatctctcaaaacctgaatatccattctggaactgctctgtgaaattgacaagtttcttcaccggttctgtaaagttattgatatacaaaagaaatgtgatcaggtcagtcaccgccactgttcccgctgccataaaccgcactccggcgatcaaaacaacaacagtaacaagtgttgtcaaagcgccaagcccagaattgtatgctcccatatagcggtagctgatcttcttcgctgcaacaaagcggtcatttccatcctgaaacttcttcatctcaatcttttcatttgcaaacgatttcacaacacggatccctgaaaggctgtcctcaatctggctgttaatatctgcaattttctctcgatttctcttaaacgcccgcttcatcttccggttataatatcccgcatacagaatcatgaccggaataaatgcaaacgcgacaagtgtcagcttcgcattgatactaaataagattgcaaaagatccaacgagcttgataatagaaatcacgatatcttccggtccgtgatgcaaaagctctgtgatatcaaacaaatcgctcgtaatacgagacaacagtcctccaaccttctgattatcatagaacgcaaaggtcaatttctggtaatgtccaaaaatgtccctccgcatatccgcttccatctttgcacccatcaaatgtccataatatccgataaaataattacagccaaattccaaaataacgagtccaaacatcaggacaccgatccacgtaatcgtatgcaacacatcctctgccgggaaatatacgacctcatttgtaatataacggacgatcaacggcaggatcaatgtgactgccgctcccagaattgcaaaaaacatatcactgaaaaacaatcctttgtacggcttataatatgccgcaagtttctttaacttttctcccatcatttctttcctccatccttctcttccaaaaatgttcctttttcttttgcaaaatgaaaaagttcccgcttcacatctgcgattgttctctgttttagcagatctttacagcatgcatttaaatccccataaatccccgccatcacatctgccatccccgatgccacacaacactttttctcgggagacccgctccgccacgaagtcgacacaaaagaaatctgaagcgcctccgctaccatggcaagtgtcacttcttctgcttcccgaaagaagagatatcctccctccgtcccttcttttgtacggatcaaatcagcccttttcaattttgccatcaccttccggatccgagccgggttggtgcacacattctttgccaactcttcactggagatcacgattcccttatgttccagaaacacaagtgcatggaccgcgatcgcaaattcacttgtcatttttgtgttcccccctgcttctgtgtctgttcaataatatttcgcatcacatcttcacttaactgaccactgacatatccatatacattcccatccttatcaatcataaaagttgtcggaaatgcactgattccataacttgagaaaatctccccggtcgtatccatcacaactggatacgtgtatccattttcttccaaaaacgccttgatctcttcctcagaagcttcccctccaagatccggtgctgcaattcccagaatcaccacatcactgtcttcttgtgcttcatattcttcatgcagcttctggatctccggcatctcattccggcatggtccacaccaagtcgcccagaaattcaaaaaaacggtctttcctttatattctgataatgtatgcgtattcccatactgatcttgtagtgtaaagtcgatggaaggaacggtctctcgttgatcgttttccttcttttcttcctgtttgctttctccggcacttgtttccttctccccggaagtattatcctgcccggtatttttctgttgggctgctgactgatttttctgtttttttgcattttctgtttcattccctgctatggaaacttttgataagtatccggtgactgcattcatcttccctgtaaacatgaagagtcccatcaaaaccatcagtatcccgcctacttttaccgtatattttacaacattcatatgcttttttaacagctccagaaggcttgtcgtaaacagccccagtacaagaaatgggagcacaaatccaagtgtatatacgccgatcaatgcaaaccccatccactttgtcccggcggatgccgccatcaaaagcacactcgtcaacgccggacctacacacggggtccacgcaaaactaaacgtaaatcccatcagcagcgcggtcagcggggacattgcaagcacatcaagatgaaatggcagtctgcgctcttttccaagtaatctgctcggaccaaagacaccaagctgatagaaaccaaatgcaatcactaaaattccaccgattcttgcaaacaacatctgatttttctgcaaaaagctcccaagtgcagatgcgccaagtcccagaatgaaaaatgcaaagctaactcctaccacaaaacaaaccgtatggatcatcacttttcgtctctcatagtgaacctttccatcctccccaatctcacccgttccgcctgacagataccccatatacagcggaatcagcggcagaacacaaggagaaaagaaactaaacaccccctgtaaaaatactgtcaataccggaatgctgatgtccagcgaaaatcccataaaaccacctctttccttattttctttttacattttttgacagagatccgtttccttttttgtctgtgcaaaattttcctgtggatatctgtacaaattgtaacttttttcattacattatttaactgtaactttatcaaatacattttttgttgtcaagaagcattttttccaaatcgaacattctgttttcctattttccatacaaacttccagagctccgtaagcagttccctataggaaaaagacaccccttggcatttcctggagtgtctttttctattccaaagctattgtcattctctgatttctcttagacaaattttcttctattttgctttttctctttatttttcttctgattctttctgcccttcaatatcctttttctcgtctgtgtcattttctcctgccacatcatatgccggaccgatcaaaagaagtttatctacattcatctcttctgccgggcagagatctgtgcgtgccttcattgtaatgactgcaagttcatcacttccactatacagcggctgatctccgcgatttgcaaatgcaagattgacataagcggttccatcactgtataccttattgaccgtcagattttccatcgctcctaccgccttcgttccgacagctgatacaaattccagatgtgaaggatcataatcgatgacagctccaaatgcattgacatgtttcgcatcttctgcaagtaccgtaaaggtcactgtctcaccggctctgatacatgatttttctgcacaaagtgttgcctgcccggatacttctccgctctgttttgtgcctccatcgagttggaacattgtaaatgcataatcataaacatcatagatgccgttcatattgatatctccacttcgcttctggatttgatccacaaagttggaaccatccttgacagaagttccaaggtaatttttcatattggtataatcaccctctgaaaccgtctcattcttattagtacttccgactgcaaatggcttggatccatcttttttgtataccggaagttcatgggatgcaaagtaattgcgccgtgatttcataatctgaagtttcagataacgtgcactgactccggtgagcggaactgtctttgcattttcttctacttccagatccgtgttatatacccactcttcctcttttgttccatcccattccagtttccaatgttttccatctaaactggagtagacattcatacgctctacggtaccacttccatagctgtcgcgtggataatattcaaatttatccagttcgtaagctgcaccaaaatcatagatgaacggagtcttgtcaccgacaacatcccccactgcgaagaataatccacggaagctgtggtctgtcgcatacttcagtgctcctgcctcatctcctccggtccatgaaatcgttccaagtgcaccaatctcatttctccacggatccagcagagaactggtcacaagctgctcactccatgcagaatacccttccgcatttctcgcccgcacgcaataagtatgctcagaatgatagtcgagatcatcatggatataagaaagtgcatctcccatggcataaagatttccatccacgagcatctcatattcagatgctcctttgctttctgtccagcataatccgatgcttgtagaagttttcgcttcttctgctgccgtcagctgcggtacagaaagagcaccattttctttttccgccatccggcaaacggtattttcaaatcccagaatctctacggtctgtttttctttctggctgtccactgttgcgagttttacatacagcttcggctctgcctgaaccttttctaccattgcgcgtaaaatcttttcttcctcagaagcgtaggtacggatcattggatgttcgtcatagaagaaaatcgcctctcctttctttggctcactttgctcaaagatttccagattttctgcttctgtcagatgcaacttttcttctccattccatgctgttactgcctccggacggtttgacaaatgtacgataaatgtgctgctacgcttttcctcatatccttcataagtaccttcggagcattctgctgtcagaatcgcctttccttccttcacactggaagtataggtcgttgaaacatgacttccatacgaaacatggtcaatggttccgtatttctcatcctcctccgtctgattatggatatattttccatcatcctcgtaagttgtataaaagctgtctccatccggccagaattctatcatccgctttgtccggtcaatggcatccggcgtattgtttgcctcatacattggaagaatcgttccattttttacaaacaccggcagtttccaaagcggcgccgcaaaattattaagcacttgtccgcccagatatttttctccggtcagataatcaatccacacttcgtctggatccggaaggtaaatgtggtttctcacatcatttccctcttcatctgcagctgtatttttataaactggcgcaactaaaatatttgctccaagcaaaaactggtactgcatatttctgctgtatgcatacgcatcttccggatattccaaaaacattgcacgcacgatcggaagtcccgtgtcatcatttcccgtatccatatttgacgcagagacagctgtcgtataaatatatggcatcaactgtgacttgattttcatatacattcggttaatccccgtatacggatccccaaatgtgtacggtgctttcatgtaagtgccccatccgtccatatttaacatctgaggtgtgaacgatttccactgatagtcacgcgcagcaatcagtgcctttcctccgaagattccatccatatcactaccaatatttggatttccgctcagagagcttccgatataagtcgggatatggaaacggatatattcccagtttcctccggtctggtcaccgctccacacactgttaaaacgctgtgaacctgcccatccgtccaaagagataatattcgggcgaaactgctctgctgtcgtgataatgtcataggccgtcttcactccatttaactggaaagagtatcccggtcctacccatgcaacatcggtcttcaatgtggtcgcccctccgacagatacttccttccggaaatcccgaagcaggtgccaatatgtctgattgtctgagtccggtaccagattactctctgtccaaagtccggctgcaacccctttgctgtttgcatactctctgaacttcgcaagattttctacattggcatctaccgctgcgattcgttctggagaactgcttccatcctcattgactcccccttgtacataatagccattctgtccatatcccccaccatatccatcatttgggaggaaatatccaagcggcatatcgtatctgacgtactgatccaatacagctctcgctgaatattcatatggcgcatctacattttcagggtaatgctctgctgccacttttggtccttctccatttaaggattctgaatgttgtccttctgacaaacgatatccggtcgccataccactttcatattttgtcatccctgcggcggtgctttcggcgattcctttaatgttccattccttctctccaccttcgtcagaccacgcatcgcgattataacaatttagatgtccttcgtaaaatccatattccggcaaaagtagcggatttccagttacatgatagtaggcttttaagatttcctgcgtaatccggcttccattttctccatcagacagaaaatagtaagcactaaacttcgcttctttatgcgcagcgcgcacaaccgcagtctcactttctccaaagtcataacttccatcggcaaatgtatttctcagaaccccatagccttccgtcgtaaaataaaacggattcggtgatgcaacacctccgtccatccatgcgctttcattgacaatctgaatagtctttccagtatgtacaaaccgtccattctgtgtaccaccaccgtagaaattttctttttctcctctgacaagtgtctgaactgtctcctcaccgatcgtgagaccttttgcttcctcaagaacggtcttgccgctgacagaaattttcatctttgccgttgctttatcaaaacttacttttgtctttccacagcagagattgatcgtctgattttcctcgtagatttctacttccggttttgtataaaaatctgactcgtccggacactgctgaatctttgctgtatgctccttctctctcggagccgcataactctcaaatgctccgctcggatctacatcatagcggaaaatagtttcttccagaaaaataagttttcccttaatattttcctcaaatgtgagccagacgatatgaccttcctctcccttttccaccgcttttacacctgttaacggaccacaaaatcccccgttcttttctcctgcttccagatgcggcgccatcttctgattattctcgctcatagtgttcctcctgttgtgcaaacttcttgcttttgtcgggcttattatataatacatccagcttttttactatatatctggctttatatacaaacagataggacattttgacaatacagcttttcttctgtttggcaaacttatagatttcatccattaaataaacctcaaccttgtacgctttgtcctctagacattcggctgcatctttgctgaaaactagacaccatttattccccatataaaaacatttctgcgatgcagatatcatcatactttgttccgctcctgctgtctttgatcgtcacgatacaagaatcaacagaaatactttgtccaaaatcaatgtaaatcatagaatccattggtgcagaaaaattcggaacatacgattccaatctttttgtccagattcgatctcctgctttgatttccagttccaatggacttccattttttgtatagatatcctctgaacttaagtaccctggaagaacagcaattcctctcacactctgtttttcttctgagtcaaataaaagatattctccgattccaacgccatccactccctctatccagcaggtagccggatttctgtccaaaagagctgctgtactatgatcatatccctcttcctgcagtgtagaacttgcagaaacacgaaatgctaaaggattcttctgtccctctgctttatcctgatttgtacttttctctgtccaagtgttcacagactgtaatgtataaccaccccacatgctttgcgaattttctatcagagtaacatcaaacactgctgagtacggttgtgcctcctgcatttccggcgtataatgaacttctccatagacttctatttcatcctctgatatcttttttacctgcatgatctgaggagtatcatttccataggccgaagttggcgttaccccttccagcacaaccattccatctgaaatttccacatgctcttcgttaaaagctcctgtcccgatagaattctccaaatattccctgacagtctcttccggaatctcccatcccatctgcccgagcttggcagactctccatccacaaaaggaatctcaaaccatatcgaccgtatcaaaaatgaatacgcaaactcttcattgaccacaactccctctgagaaatttttcccatttcctcctgcatccagtttacaaagcaggctcagaaaatcagtgatctcattctgcacatcggcatccagtgtgatgatctgtggatatgtctcatctttctcctttgtttcgttggaaaccttttcttcttcctcttttttaacgctctccttcttttttcttgcttccttcttttcttctgcttcttgcgcctgtctctcctttctctcagaagccacacctgccttatacatggcaaatgctcctcctccgcataacagaagaatacccgttaaaacagcaactgcccagattttctttctgattgatttcttatgagtcttctccttctttgaacccctgctttccgttgctttcatctcattgctgacaccgctttctgccccgcaatacgggcaaaatctcacaccctctttgatctctttcccacattttttacagaacatcttccctctcctttgttttgatttcttttttctttcttccaacagtaaaactctatataaaaaaagagaactacccttcaacgttctatctcctgctgactggtatttctcttttattttttattttgtaacagttttctcttctttgaccactttttgtagacaagaacaattattcattcatattactcagttttgccgcctggtctgctgcaatcagcatatacgtcttttatattagggtgtaagcatatacagctatacacctacttggcatgaacatatacatcaaaataccaactaatattaccataccttacacagctatacaacatcatcttctgcatcttcactatttaatagcgattttcacagtaataggtttccaatatttcttcacaaatctcctacctactcttgatgactccataaactgttgacattcttctgttgaaataataaatgtatgtatgatgttaaagttatcatcattttgtaaggactttgcaaattcttctgagtactcttttattctataatcaatcgtattttttcttacaccagataaattcatttcccatacaaattcatcattatctctgtatatgatacgttccacaaacatatcaattaactcatcactaacttttcttccagtaaaatccacataagtattcaactttttttcaatagtttctatatcaaatgtttccttactatctcttgcttcttctaattgtctgtcacgaatacctttctcaattccagccttttcctcctccaaacgcactgtaagttttttgaacatattcgcatcgatttcaccagacaatttatcaagatataaattctcaatttgtgtttccactttctttaattcagactctaaatcttctaaggattttccagtcctatttttttgtttgtacttctgagcttctttcaataagttaatcgtatataaaatttcatcttttgagtcaccaaaaatatatccaaatactttcagagacatcagccaaagttttacttctgaaacagcaggaacatgacaaacacttttctccttatgacttccactgttaatctggcatcgacaagtataacgaaactgtgcttctttcttctgtgtagccacatgaacatattgaatacttcttgtatatccacactggcagaaactcttttgtgcaataatatctttaggttctcgcagtcctgtaactatattacctttttcagaataaatatactcttttgctcttttcgttctaatctcatttgcaagccaccaaacttcctcagaaacaatcggtgtccagttaccctttactaagttacacttcttaataagattaccatctttatcatacacatcttcacgaataggctttatcttcgtagcaacttttttcttctttatagtatcaactactttaacctttccataaagaatatatcccatatatttttcgttcttaagaactcttactactttagaagcactccaattcaaatctcctactgctgtcttataattattttcattcaaatagtctgctatcttacctgaacccatacgtttctgtgggtctgggtgcgtatacaaatcaaaaatacgctttactgttatactttcgacaggatgtggagtcaatgtattcaaccttttatctatattcttttcatagatatagccaaaaataccagaaataaccaactgcccccttgcacgataagactccacaccatctgaaacacgctttgcagtacgcatagactctccttgtgccattcctgcatcaatcgcaagacgaagaatatctgtctctgtcatattataagtccagtgatttccatttaaaatcagcactcctactccgtagtcttttaaaatacgaatattagtaaataactgttcaatatttcttgcaaaacgtgctgtatcttgtactattaaaacattaaactcatatcttgaagcagactgtaacatcatattaaacgcaactctatcatctacctgtctaccagaaataccatattctgtgaatttatgtttttcatctaatatgaacttaggattgctttcaatcatagtatcaagacgtacaacttgattttctaatgccattatctgctcttcatgctttgttgactccctagcataacgtgctacctgcaatgttctgacagaatgtaaaatatcatcaaaatgtgcctgagctaaaaaatctcttatatccatcttacaaatctgttcctctgtatagtgactacttaatgccatatatatccccctttgccatcttctgtgcgactatgtaagtctccgtatcaattaaattttcttcatataatttcactaaaaacacttccacttttgtatccttttctacaaaaatattcttacccatattacgttctccttttttcattcaatatcttttttgctatcacataatcttccgtaccaattaagttttcctcataaagttttgaaaggaaaaaatttatttttgcttctgataataccattcctcttcttggtatatttaaatcaattcctttcattgaagtttcttctgtctgtaacagattactagcgtatctacacataatatgcctccttcgaaaaaaattctcgaagtacataaggcaacccaagggcaaacccaagttttatcgtaaacacatctcctttatgcaactcaatcgaaagaaacattatctcgcataattaaatgcaaactcgaaacgatttctcaaaccaccgttacttttgtaaccacagttcatttcgtaaaccatgtgatttttcaaaaactacaccccatttttgtaaaccacattattttctatcaactctctaaacgtcactggctcatacccattcaacatacagcctgcgtttaatgccttttccaaagtacgcatgtactgatacaccccatctttcctattatgtatgtgaccgtagatatggtatgcacccttatgaaaaccattccattctgcaataggaaagtggcacaatacaatacgctctccactgtcctgcacaaacaacatcttatccacagagtccatacaccccataacttcaaaatcctttagtaatgccccatcatgattaccctgaatgaggtgcttcttaccttttagttgcttcagataccaagcaggactatgctcagagcgataacacatatctcccaaaatatacacatcatcatcatgtgatacccttttgttccagttttccataagtaccatatccatttcagatacagactcaaaaggtctgttatcaaacttcaatacatttttatgccctaagtgcatatccgctatataaaaattcatacaataccatctcctatactaactcatcatttttcgcaatttataatacgttgttttcttcaagttcagaagtgacatagcttccacagaagttatctctttattttccaccatagcaataacacgttcccattcctctggtacttgcacctgcggtcttccaaatttcactcccttttcaagagccacatcaatcccttcacgctgccttttcagaattttctttctttcctcttctgcaaatccgcctaagacttcgattaagatattggttatcatttcttgtatccattgtgtttcctctttaaaatccaccaaagttgtaggaatatccaatatcttcacacgaatgttcattgctttaaattcttccagttcccttttaatatcacttttctttctgcccagtctatccaattctttgataaccagtgtatctcctgcacgaagaagttttgtctttaatagctgataaccatcacgttctaagttttttccagactctttatccacaatgatattgcgttcttccacaccaaactcttttaattttttaatctgcctgtcctcatgctgagtcatggaagatattctggcatatccccatgtaataccattctccactatattccacctctctttcactttttacagagaaaaatctgttcgtaaaagtcctgataaaacgtgaacgtgcggaaagtagcagacagagtttaatgaacactttttcggcatattctcatagggttttgtagtgaccgcaaaagtatacttttttgaacgttcactttacggactgttctatgccagttccgaatgatacacccctattttgccctgtatgcgattatcagaacaggctacaaggaaaatacccatatataagcaggaaaaacgcatacagagcaattttccaaagggctacctgtttgaaagccagttcttcacaatttccgcaaagttccgtaggactttctgaacgctgtctgagtctaactctgttgaaaggaaattggaagtggctagagttactaaaaaatcaatgggaaaattgtcgggtttgtatccccataaagagagaagccaaaagtgacaggttctgataaaggaaaaagaaatgatgaattttaggttgaaacgattatatgtaatatagaagaaactcagttttatctttggatttttcttacaaaaaaatcacagttcccccctataaagacttgctgttaatgatacctcaagcacaagaaataaatacaaaatttcaaacagacgtcaattatatgttccctactatttttctaaatttttctgatagccagtgtttgagccagttttacgttcaaatcaataatgcattatagaaaaatgataaaaaagtaccactaaaattatcagcaaaatatgacaatttcagcagtactctttttctatatctattttattatcaacttgaaacatactggtttcttaccagtattaagctacccttttaaaaaggttacaatcagctacataagaaatccctctcatcaagagtaactccatatattttctctaccatagaaagcatttttttcagtgccaaatataggtttcctctttcatgtggttcaaagtactccaccggcataccagaatcgattataaaaatctctcgctttctaaagaagcaccctaaaaagtttgcacatatcacgcaatcaagacttgggaatactattctcatttcctcgaattcactacgacataactccgtaggataattaaatagatgtgttacaatcccaactgtaggtgatacttttccttgattaaaaatactatgtggaaactcatattgaaagttatcacctttgctcgtatgtaccatataaaggtgttctggatttatattctttttctccaggcactgaagaaatatcacctttccaaaggacatattataatatactgttgccaaataaggaatccgcatatcacatcacccccatgctatgtaatatctcataaggcaatccaaatacataaacagaaaaatcttctaattgctttttatcgtatttactggtgtcgagccttttcatcttatgcaccagtatatatttgtaataaggtaaatttgaaatataactacatccaacaaggtttttcgcatcttcaaagacatcattttcttttgaattactcatatcaccgcacctccatatccccatattctacttttttcttcgtgtcctgcagaaatcgtataatctcatttatttctttcgtagcattatcacaaccataaaattttatctgctcagtgaaacgtgttttgtataacaaatcataaatgctttcttccttagaacagtctattttaatcaaagactgatacccttctttcagtttttcaagagccttatctaaggactccgcatagaaagactgtttttcttttcttacaatattttttatggtctttgtttgcattgggaactcaaagtgatctcctgggttcttagaagcactaagctgttttgataaagcactaatctcactcatagcataacgttcaaggattttttctttctgttcctctagccagtataaagctccttgaacaatttttttatcatttgaatttaatttctccatgacgtatgctgtatcagataccagaatattaaggttctttaacagtaaatttctatcttccaatttaggattttgcataatgcgtgttggcaaatctgattttaattttttaatctcactttcacattttctagcaatcttttcacacagataaatacaaaacaatctgtcatgcagagcatttccctcaacacgttcacgaacttctgatactttttctgtgagattatcaattcttaaaataccttcttcatttagataattattataggtattctcaaatgttttcatgctatcttcatcagtatacagaactacgattgctgtgtgattaggatactttttcagtagtgttctggtaatcaattcatccgcaactgacatatcaaagtagtatcttccatctggtgaaatattaatcggtgtaattgtgccttccttcacataattcagtatcgtctgaggggctaaatgtgttcgtgctgctaaatctcttgttgttaatctttccataaataaaacctgcctttcacaaaatcatttttaatttgctttcaaaaagcatataaatgtatcaatcatatccagtcagacctctaaatgcttttgatatcagcacaaatgctattttttatggagcgtgtgcaactggcaaacacacagatacaactgctaatgaataacgtgcaagtggaagtcgataacgtgtttatggtacaggaacgtgtgttatggatatttgagaacgtgcaactggtcaagaagtgtgtgcaagtgctatcggaaaacgtgttattttcattggataacgtgcaactgccaatggagaacgtgctattttcatttgacaatatgccactgccattcagaggtatgctggtgctaaaggcacaacatccagtgctaccagaacgtgtgcaagtgctaccagaccaaatgctattgttcactgtccaaaatgctttggcagaagaattttaaagaaaggcacagcctgatagcccccttttgtttattgcagaagataccatctcagactaataccatgagggagagcaaagcccactattctttcatagataccagaaagtaaaggaagatacataaatcttctatagaaaaaagcctgctcctaaaagcagacttataagcacctcatcagtcaactcattttccaaatgagtctaacccccatgagttttcaaatatacaaaattttcagaatttctcaaaggcacatcttaccctgtatctgctataaaaagcggtacttctgatagggtggaaatcgtcatctgataccttatctcttgaatttttaggtaaaacgcagaaaataccagtaggtgtgagttgatacagtgttgagaaaatgtatcttagaaattatctgataccccatttacaggtataaaaataacccactgatacattaaatatcagtaggttattgttatctctttagaggtctacaaactgaaatttatcttagaaattacagcgatgttattttgataaactttcaagaattgaaatatcatgcttatctttatctcttaattcataacctgaatggaaaactttttggccttttaaagatatacaaggaattgttttgccttcaaaaaaaacactaccaaagtaatctttttcaaactcataccatccaccctctaaatcagcttgttttgaagttccgtcctcatttaaaacgaacgggtgaatgtctaagtaaccaagttcatcactatataactctattctaaccggtttccagtctgtatcaattttatagcccagattcaaaagcacatttaacaatttttccgtatgttgagcatcaaaatttatatctatatctctatgaattcttgtttgtttaccagctaaaatatctacaccccatccgccatccaaccagtatgtaattccagtattttcgaataattctattactttcattaaatcttcttttgttgttatttcttttctacccatacaaagtctcctttacaacttctatataattgtttagttaagtcaatatcaatatctaattgccaaggctcaaaatcaaaaatcatggtcatcacactcctttttaaaattctaatttgtacttctctatatactgccagtatatcaaccatacaccccaaacacaagaatttcttcgtataaaatactaatctctcttcttctatcttataccccattttatacacaaaaacaagcctgccaatacctaggtatcagcaagctattctcatcttattttttaatacttcgctttaatttgcgtactgcctttatacattcatacaaatccttttcatagagcagagctacaatctcctccagttctggaaatttctcagcacatttttctatttctggcaataaacatttcatagcttctattggttgaagtttttcatcttcagaagtgtgtaaaatcttaatcctttttgcatcgatactagacttgtcattacgactgtactgatatatcctaaccaatgtcagtaacataatttctacatcattacacttctccatcttccactcttttacatctaccatactcataggcaagcaccttactcaatgaagtggacttctgtggtagagtctgacatcactactttaacaaataaatcatacttccatgactttctcttgttctcaaattctgttctcttatcctttaagtgcatagggtcaagaataacttctgcatccttttcaaccaaacaattaaaataaaaactatcctgtaaattacagtcaagacctgctgcaggaataaacatatcttcacagtcagagccaattgtatgtcgtgtgtaataatcctctgtactcagttctgcaagatacattcttgctgtggcaatactcagatgtttcccatgcacatcaatatatgtattggcatctgactccataagaatgttattgattttatccagtctctctaataaggctttatcagtctcataattttctttcagaaccttatcatttttatttttcactttgccacaataattcatttctcgattatcagtgcttgaaaaataatgatgagttttgtcgaaaaactcataaatcttagcacgttctgcacgaagttctacaactttcatgtaatacacctctttcaattttgttttggtgtccacactttagctctgaataaaagggattgcaagtcctaaaagcatgttctttacaggtttatcactatctactaaaatatgccgattataattgtgcttattgtatcctatgccagagccagtgaaaaagggctttgccacagaccgattgttctgggtggttttggcacgaatacccccgtacgaggagcgtgttggcagtttctagggcttttaagggcaggataggcatatttacccataaaagggcttttagagcaggaaaaaggcaaataaaggcggtacattttttcgggcatgaaaaaagagcaggttatcagtacgaaaccactgctctttacgaaagtatatgaattttttccgttttgtataataaggcatctaccgcagataccatatcataaattgttttcccctttactatggactttctccatgagctgctgcgtatatctacaccattacaagtacgatagcaccaatagcatctcttattttttatttccatctttccatccagtatttccatagtcctactcactgttataaatagggtaacttttgcaaatgtattctcctttgtaaaaccatagccttctaataccctattcaacgtctcggtattacgaaaagatataccagagtatttgtacttcttcttttcacctgtttccttatctttcacagttaaatataaagtattgaagtctgtacttctccaatacaaatacattttattcttagtgttttgaaaatggatctccaatgcaaaccacatatctgctcctctcctcttacaataaaagggggcaaccaccgccccctatgtaaaataataatacctatgaaatttctttgggcatttccaatgccttcttcccccatttgtaactacctaaatttactaatcaaaccagaaagaaaatttagccttgcaaccactttaccctctaccatatcttcagataccttgtcataatccgctttttcattgttgtcaccttttgttgtaatattgccttcggcatcaatatcaactgctcggtggcaaacccttgtatcttcgtctatacggaacataactacatcgccttcattgatgtctttcgttttctgtacaatagcaatggaatttgtttccatatagggctccattgaaccagacaaaactaacactggtctatatccaaagatataaaactcttccttttgtatcataactcctaacagtatataaactgaaaaagcaatgatactataagacattaatctgcctaaaattttactgccttttttcaatataccaccgccttactataagaactattagtactgctagtgaaactaacatggtaatagataataagcccacatgagtattatctcctgtttttacgatgaccttatcacctttttgaatgatatctacatcttctgaatcagtttccagtaatcttccttcaaagttaaatcttgcctgcatttccatagattgaaagtcattattaacttctgctggcatataaccttgtaatggtaattctactgtttcaccgctttctacctgaacccattcagaagataattcattcagtttcacaaaatcactgttattataactgtacatcatcacatcatagagtgatgaatcattcaaattctctgtatctactaaacgaaactgaagtggactttctgtttcattcgttacttctacggtgtcctccataagttccataggagctacactttcatgtacccattcctcaccaccaatatgaaaggcgaaatttggagaactggcatccgctttcagcggacttacaagtatccccaagagcatgatacctaagagcaatctcttcatactatttcgcctccatctgtttgaatgtaaaatacccagtgtcatagtttgccatgtcaagaccttcttgctgtgaagtttggctaccagttaaaccagtacatgcccaaaatggtaagcagtcagtctttacaatatctgaccaattctctgatacatacaccttattcagtgaatacatataactaaacatctgtgataaattggcatctgcacgcatcttgaagccagacaaatcaagctcttgtactctactgtccttgaacatacccttgtaatttacagcatctcgtgtgtaaaaatgtgacaaattcaaaaaagctattgtaggacaatctttaaacatattctcaaatgtttttactttttcagcgtgttttgtgccaagcttgatagtatacagttccttatcatttacaaacatacctgacatgtttatcgcactctctacattccaagaactgatatccagttccttcatactcacgcagtttgcaaacataaactggaagttctgtatgttaccagtatcaagtttattgacatctgttgtaagcaacttcacacatgataagaacatattgtatgctgaagtggtgtctcttgtgtctaatacattcttaaaagtaatggactcaacgcttgtgtagtagctgaacattgtatttaaggactggtcggcaataatgcctcctctaccccctatgtacatttctgtggtattttctacccaagccatgacacttccatctttctcttttgatacatcgaatttgttaatacccattttgtagtctgctaaatctggtatggtactcataaactctactgttttaatatctgcttttacaggacttgtgatactgttaaattcctcaccagatactaaataaggtcttatccatgtaccagatgtagcacttaattctattgaatttgaagcagtaaaccatgcaaatgtctttgtgatattcaatgtaaatagcaatatcaacatagctacaacatataggaatttcttctttgtcatagtttacctccctagcaggttaatcttcgatatcgattgccatcatttcatcttccgcaacactaacctctggaactggtgtctccttacactcaactcccatgattttctccatagaagataccactgcattaacaatattctgttgattgttgcggatactcataaatattgttgtcataattgccccgattgttaataatactaatgtaaagcgaataaattctttcttactcatagtaaaagtcctccttaataattttttatgaagtagtacctcaaatttgaggtactacaagtatcaataagttatattgagaaatttagtttttctcaacaatgtttacccattcactgcccaatccgctagtgtttctgtgctgtttagcaaagacttcaattttgacatcagaggtaacaccctgccaactgttctttgcatcttcatccatagcaaacttgtaatcgtatttgtgagtagtctttgtagaaccatctaaagtctcatctttctctacactgcctgccagtgctacatcatcgattgtataagtgatagtctgtttgtccttacttaatactccatttaactcctgaccttctggtgttgtgattttaaattcatggtcaccttcattgaaagcctgtggtgcttttactgtcataacagccttaatatccatagacttttcaccagtgttatttacagtaaatgtcaatggattggaatcacctgggttgatgactgttaatccattagtcaaatctgtagtagcatctgcaatttccatctttaatgtacctgcttttgcactcaaatctttggagtcataatcagtaaaataagccaatgttccacctaaaattccaactgttgctaaggctgctgctcctgctgttactacctggcttctctttaatctcataatcttcgccctcctaatggcataaaataaattatttgttctcattgcgattaggaaatactccctcttcgcattttctcctcagttcctctacatcttcttctcgaaacttgaggtatcccgttggtgtcttcatagcaatgggaatgtagcccttcaatgcccactctcgcatcgtattagtgctaatttccaaacttcttgctgcttgaatcgtcgacatcatcatcttgtattcctcctttcttagttttgctgtctgctaattcaagacgaatcatctgaatcaagcagaggaactatagttccaataccactaattaaaagtgatatactaatttagatataacttacagctacagaaatcacctctttttcagttacagaacttaccataaggggcagtcggggcagaaactgccactgcctttaaaaggaaaaaaaaatacccccgtgagaggagcgaagctccgttagaactaccagtccttagagcttctaccatacttctcatggaggattttttaatactttattcttttgtaggtggtaagacggtgaaccttatacaataccgtcataccctatcagcttatcaagcctttcaagcagattatctggtatctccacataaccccatgtatctggtgcagttcctactggatattcacacacatatacctttccagtactgtctttacacaattctcctgcttctggtatatgaccgccactccatgtaccagttacagagtcatacacacaaaagtttttcttattcttaatacagattactctaccaaaaccatcggtattgacatttacaatatctccaccttgtactgcctgtaaatttgaaagtcttggctcatttggaaatcttctgttcaccagtttaaattcttctggcaagaacacgatatccccattatttttacagtacaatcctactgacagtgcctcgctacccttgctcttcatatcttccagtaattcttcccagatacctactgcatctatttttagagtcagtaaagcaccataaggacttgcctctgttttatccgttactgggtttgttacaaaggtgtctgtgctacttatcgtagctgataacccccataagtttagtaacccatcagcactgatttctacctctggagttggggttgataaatatccatctactggctttaactttacagttaatttacctatcgtgttattgatacctttcttcagtacaaaagtttcctctttgatactgtcgctcacatcataagcaaggcgatatttcttagcaggatctgactgtgtggtgtctaaaatgacttgctcttcaataccatttttgccaaatacactaggaacatattggtatattggactgctaccaaatatctcttgtaatttcagataactcttatctaaagttaatatcaaggatttatttgaactggataccccagtaagagtgccactggcatcatacttatactggtctcctgttatccttccaaattctccgctagtaccagacgtactgtaatgcaatgtatattcattactcaacggttttcctacttggtctgctacattcatatcacaataaatcctgctctggtatgaagtactgactgccttctgtgaataaccactactagccccttcatacgcatagtgaaaggtcactacgatatcagttcctttgactgtaccctctactgttttatctgatactagagtgtgtcctctcttcgatagaatgtcctcattcgccgaaaatataaagtgacttccattaactgccaatggagaacagtacctatcaaggtctggaacgtaaatgtttctctctatgaccttctcacttgaataactgtgaatgatatcttttacagtaatcttgtataagtccttctgctcagttccatccatgaatttctcgggcgaagctgggacttcttggatacccccattaacagagtctttagctacaaataccagatactcatacttagcacaataataataaggctgactatataaatatccatgtatctctatacgttctggtggatttactatccagttaaaacttagctgcaactctcttgagccaatatcgatataggtcagcatggtacagtctgtgagtgctcctcgattgaaaacagtacaactttctggtaaaatcagtttcttcatagtactgttatttaagaaagccttagtgcctatcttcttgacaccatctggtacaataacgacctcatcgtttccccaatatcttactaaagttccgttagagtcaatagtaaatttctcctcttctggctgttctaacggactgaaagttaagttagcaaacttatcacagtataatggtacttcgctgtatggatacccagtcacctttaaattgttagttcctaagacacaagtactgctcgttccaaaaataatattcttgctgttaatgactacttctttgaggttctgacagttgctgatagcactgttagcaatattagtgcataactcattgattatgattttttctattgacacgttgttttcaaatgctctactgctaatcttggtaacattatctggtactataactacgctgtcagtgcctgtatattttgttaggacaccattagagtctatttcaaagggcgaagtactggcgacctcctcattcaaggatatatctggtatctgaggaatgatgtctggtacttctggctgttgaatgttgggaatggaatcttcaagacttggtgtttcagactgagcctcttccatcataggttctgtctgaactttctcctgctcttgtgttgtatctgtttccccttgtgtgtcagcgtggttagatgtgccaacctcattaggtactaccagattaacttctgctgctagggaagtaactggtattgaaatagccagactcgccgatgctaacatagtgattactctcctatacttcatgttggtttctcctttcataataagttttctcaaaggcatctacatccttatctgtaaaaatacgtcttcctgtaggagtcacagtacaggcaagccagcctcgattgacataatctctcactgtattctccgataccctcaagcgtttagctacatctcctgtctttaacatcaatcagcacctcctttcctgtgttttgttatagtaatatatagaaaacttactgattagaaatgcagtctgaagtttgagaagaaactgaagaaagcccctaccatactttcgtatggtaaaggctctctatactaattgatacttctcagcgtttcatatactcaatccattagatatttctcgtgatactctttattctctatttcttttcctccttcgtggcttttgggttggaagaagccttcggcggttttgtcttatccgcttgtggcggtcttaccccctgtgtcccctttgtagtgacaggttctttcatagaaatagacttcttatcccttaatttgaagtacatctccatactttcctgcatagctttcagtctaccttctgtcttagtacgtttgatatttcctgcacctgtattctcctcatactcaaatggtacatgttcagcaaaatacaggacaaattctctaaactcttctggtgtaatacccttctccaaagcaatatcagccatgatgaataccataacagcattggttttcttcaagaacttagtttgctgtgggaaagcatcttttaaaaaggttactatcttactgatcaactcccttttctcctttggatagttgccccttatttccttgcagtacttcgttacctctctcatggaaattgctttataatcataattgtaatgtcttgcgtctaacaatagcattgactgtaacagtatctctaattcactttctcttcttgcctgggcaagtgtcatcggtacagaattttgaaaaaatggggagcatgttatttctctagtccaagtagcaagttcagtacccatttcagttcttgctttctgtatcaatgttaatggtgaagaattattcagacgggcgaaagcctcttcaatctcatcgtcagtcgcatcttccagtaagtaaatagtaaaacgatatcccaatatgaggtcttttatctcttctgataactccttaaattccttccctgctaattctattgttttaccatcaacgactacatctggtgtactagaatgaagtttgtaatcaccgttaatatactcaaacaaagaagtacatctttgttttccatccagtgcctgatgaattacactatcatctttccctttatacttgataaaatataaaggtggtactggaaagtccgccaataaagaatgaactaataaggacttttgaagtggactccactgccctgctgctctctgtattggcaaatcaaatcttaaagttttacttatataccatttctgcaaagttcttaatccttctggtaaatttgatttctgcatagataatcctcctatttgttgttgtttttaggtctcttatctatcgctctgaatagggaataagtcaagctattcttttatgtttatctatagtcaccaaatacaatagtgattttttatctattgtgcttgggttcttgatgggctgaagcccaactaaccccctatcatggaataatgaagaataccatatctcagacatagaaaaagactgccagatacctactctgtaaatgacagcctcttctgataccctattgagatatattgactctgattagttcaaactcctctttggacaacttctctactttcatcaatgcacctatatttctcaaagtttcagttatgtactccagtattgtatcattttctttatactgaatatccttctcaatggaaactactatttcaactggaagattggtcaaaatcagtacctgcaaacgactcacatggttcttcaatagtaaagtagctactttaatgtctctttccagagcaatcaaatcttcttgaacacaccatttataatactcatccagaactggtttattcttattttgttcatatacttcttgacgtcttctctctttttcttccatatttaatctgctttgttctcgttcagccttactaatcttcatttgcaatcacctctaatattaaaattcatctcttatataccctttacctaaatatgctctccgattggcaacccattctttataagtttccttttctactccatactcattgaacagctcttcgtactgcatatacaaatctttcatgtgctgactgtcaccaatagcctttccagaaatcaccctataatatgtagattgagaaatactcaactggtctaaaatatctttcatttttagtccattgattaacagacaaataatgcgtactgtagacctgttcatattatttattctagtatctatcgcctcagttgtggttctgcccttctttataaaagccagttcttctttcagacttgcattttcagcctccaatttttcaatctgtccttttaacatagtaatttcatctaccataaatacacaccctccatttttcttatatttcttgcaattatttttgtatttgggactgaagatataaataaccccagtcccttcaaatatcttaataagctgtcaaacaatgaatacgtctgttgataccagcatgagatactaactgtaccctaccactgttagtcttaaggttatatttcactttcttgttctgtctgttctttctattcttcatatctattacctccaatttatatcatctttgggaatgtatagtacatccccaaaggaatttacattttataaaatacaacttgtattacaatctcatttatgatgcaacactatatgaaattggtgaaaagtgttctaacaaaatctggttatatgcacttgccttttcagcactcatatctttaaagaagtatctttcaagcaatatagccattccaaaacgataatcattcttagcctcataagcataatcaccagatacattttttgaacttgccctattttttgaattttgtttatttgttactgcacgaagattgtgacttctattatcaaaacgattacaatttatatggtctgcctgtacaccgttgacaacaccttgtatgtctaaaaccaatctggctactttcactttacttttaatcttaacaatcggcataggattttcataaattcgtgtgttatcgtgtctgtcattcaatgttaaattttcatctttaaagtatttagcataatcttcataatcaagtaatgttggtattccaactccttcgttgttatatacaacagcaacaactgtagactcattgtctggatacataaaataatctgtataacaatttttgtatcttgtactcctagtttttacttgacctatattataagcaccacgtcttaataatgcttcggagattgtttcaccatcctttaatccaagcatgaataactttgggtcataaaaatcgtagtttctgtaacccagaagtttttgtaagcgtatatctgtttgtgcaatatttcgtaaaactacctctttactaaatgcctcttttcctactgctatctgtgtttccataatgttctcctccttaactgccacagcctcgatgctttcttttgctactaaatttttcataattattacctccatttgtattattttcttatataattagtaacatctctaagttttacactcagagttttcacacagaaaaagtgtgaatttttttttatttcctataatagtcctagctcgaagtaagataaatcaccttacaaatgtgataaaaatactcgctttgacagttcttacagcagtacataatatgttctttatgggctttggcgagcctctcacccctatctttataaagcctgtttttaggcataaaaaaaagctacccaactgaacagtgatatgatacctctaaagtagacagattaaatataaaaatctgttactttggaggtatttttcatgtccagaaaagcaaagtttacaccggaagaaaaagaacaggctgttatagattatcttgaaggaaataaatctagaacacagatatgtggagaactatgtatttcttcaagaactattcaggactgggccttgatttataataaacatggacttgccggtttttcaaaaaaaatgcgaaatgggtcttattcgaaagaatttaaaatgaaagtggttgaggaatatgtaagaggtgacggctcttccattgatttaggaataaaatatgatatctcttccggtcttttaagaaaatggattagaatgtataatgccaatagagaacttaaggattacaatccgaaacaggaggtctatatggcagaagcacgaagaaaaacaacatttgaagaacggaaagaaatcgttgattactgtatcaatcataatcgtaactataaaaacaccgctgcaaaatttgacgtttcttatagccaggtttattcctgggtaaaaaaatatgacaccgatggtgcagatggattaacggatcggagaggacgtcacaaaacagatgccgaagtggatgaactagaacgattaaggcgtgaaaatctgcgtttgaagcgtcagttggaagaaaaggatatggtagttgaactgttaaaaaaagtgaaagaattcgaagggatgtgaagcttggaaagttacgccatgaatcaaaatatttagcaatccgatatttttatacaaagaaaaactggagtatagaatggatgtgcagacagcttgagatatcaagggctgcttattataaatggttacatcgtgaagtgccgtatgaggaacttgaaaatatcagacttgcggaacttgtcaaagaatatgatgaacgcttttgccatatcttaggataccggcgaatgacatcctggatcaaccatttcaatcatacatcgtacagtaaaaacagagtccacagaattatgaaaaagctgggaatccattctgtaatccgtaaaaagaagaaaaaatatatttatgccaagccggatgaaacggcagaaaatatacttcaaagggatttctatgctactgttcccaatcaaaaatgggctacagatgtaacggaattcaaagtgcctggagagaaaaagaaactgtatttaagtgccattatagatttatatgacagatatcctgtagcatatgttgtaagtgcaagaaacgacaacagattaatatttaagacatttgataaggcaatcgcagcaaatccggatgccaaaccgatttttcattcggaccggggatttcagtataccagcaagacattcaggaaaaaacttgaaaaccaggaaatggagcaatctatgtccagagttggacactgtatcgacaatggaccgatagagggtttctggggaattataaaatctgaaatgtatcagatgtacgaaatcattgatgaggtttcactaagatatgcaatcaaagattatttgcgtttttacagtgaagaacgtccacaggacagatatagctgtaaaaccccatcagaagtgcgccaggaagcattgtcatctgatgtacccacagaatacccgattcctgaaaacaaacgaataagcaaatataaagagaaatggtgtgcatagaaaaatgcctgcacttcaaaaggaaatgcaggcatcatccacatccaattttagatattttacctgtctacttgacaaggggcatatcacagcggatagcttttatcaatacctattttcatattggaagaaattatatggaattactcaggcacaaaaaaagaggatacatacaaaagtacataccctcttacaaaataaattccagttttaaagtacaacgatacttcatcgcaagctcatgtctctactgattatagtagcttctaaaatagtctgcagtctcgttaggtttaactttatctgaggtaaacggtgggataattattgtgtccatgattccatctgcctgtagctgtttttcatactcttttgctctttcataagtctcgacagtacacattaaggaataatcatttggttctctactctcaataaccgcaagcacatactcctcatcttcattcgccatatccacaagttcatgtaattccatatacacagcacctccatatatagtgtttttcataggttctgtatagcttaactccatctctttttgaatacaataggctctttaaaaaaacttttgtatctcaccaaaaattttacatatccccaatcctattttgtttctggtgcaaaaaataccaaatattccagtgtcttatcctgctctttcatagttccagataccttatgaactgcataatctccaacgaaaaattgtaccctatcatcttccaaaggaatgatttcctttgtagcaaggtcaatgaaactcatatcgtaagtattattctctaaaatactgttggcacactcttcgcacataacactactcatttccgctgcatctggtctgctgtcctttttcagtctgaatgtaacatcggttatctttcgtgtattattcctatctatctctactattgttttattttctccgtttgtattgattgtactactagagccagaatcatcatcttctgataataatggataaatctcgagacgattgagatttagtataccaataccttcgttataaagtgaaaataaacttctatcctcattcccacacatgaagcactcttccttcttttgatatcttatgtttttatcgaatgtcttaccatgtgaaacagagatacaccccatcaataaactgcatgaacacgttagagctataatactcaaatatatcttcttcaaaacttttccctcctcataactatagtgtttatagacattatactgttttaaccctagttattcaaataataaatcttctgtatagttttatagtgtctgtagacattatactcatattatagaaagggaaaaatatttgatacgtttaaaaatcagagaactacttgaccaaaaaggaaaaactaaatactggttgcataaccaaataaatatggactataataatctttctcgtttaatgaacaatgaaactgataaaatacgttttgaaaacatagaaaagttatgcaatattttagactgtacacccaatgatttatttgaaatcataccagatgataaagacttatcacaataaagcctttcctaaatgactttaggagaggttttattttttatgcaggataaacacatatccttctaccaatgggaatttttttacggtgtctgaaataaatgtgattgtttcacaaagcaagaaatgtatattaaaatttttatttttatctaagccccaaaattctgtatatcatactattctttagaaatgtaaagacgttccataaggtattggctgattaagtttctttccaataaaagcctgttctgtacaagaaaataaaaaagataaaaatacaggtcataactgcttttatgaaaaaacaggcagcgagatgaaaatatcatctcactgcctgttcttgaatacccctattaccttaacatttcgctcgttgtagcactaggtatcttaaaatctgccccatcaatatgcaggttattgataagaacagagcctcctttgaagtaattctcactcgtatctaccatacccttatctggtgcatatctttcatgctcagataaatacaaattcgtggttttctccctatcatttttaaggtataaggttaaataccatttaccctcgttgctgttatattttccctgctgtgcagtagttctgttatctctacctgctgtactatctggtgcaatgttataatctaacttatctgtcagaatgatgttcttaaactctactgactggctttcgtatcttctaataaggaatacctttacctcttcgtcataccagttatcttctgtattttcagacctaactgcgtgtgctccgttgtcttcagtatttacgttctgagatttatttaactcgtctttgatgtcctcaatgcccttcaaaattgtttggtacatattagactcttcaaataatttcactgcttcttgctcagagcactgataatctgaagcaatctgcttcagtaatgcctgatatcctattccagaagtatctatctcaccacgtctaatatagattggatactgacttgtttcagtatgtttggactgttcatctttagatactaaacttgccatcgaaacattaaagttgttaaattctttcgtatcctttttgccttccactttcagagtgatatcggcgtataagtttttcttaacagaagtagcccattctacatactgttcaaacaactcatcagatgaagagctattcccccatgtagtgtaaggatctctgttttctaggcttgtatcatttactactgaagtataagggataacagtatcttcagatagtttaaatccattcttatccttatcatagtttaccatatctaatgcgtagccatacattctaagctgtggttttacttcctttacattcaatgtgatatcagaaccgccataaataactggcatatttttatcacgactaccacctctattttgaagcctttttgcgttagaacctgtagccattgtttcagaatacacattaccactaactaactctctcttatcagaaacatccaatctcataagatacattgatttaggctgtacccttctgatttcttctgccatagttagaactgttcttggtataatacttcctcctccaagtgtatccataccatttgtaaaataggctctcattctaacttctggatagaatgataaaggttcacactcagcgtttgcaccaacagctaaacgatactgctgttcttctggaagtgtatcgttgaaaccttcgttattcaaacgtttacctgtttccagtgtgccatactctttatcaccagagtacagtgtcttgcctacttccataaccgctgtactatatttataaatggtttctttcacatctatgtccagctgatatattggaaagcctttgtatgacaatggtcttgcaccactaccagtaaggacttggtatgtatcctgcacatcaacatcaccatcttctgtctgtttaattcctttatgaactaaaacagatacactactcggttgtttaccaccttcagaccataaagaactgaatgaaaaactgtcctttatttctgatgtataaattgctttggagtctcttacaggtgtaacatcaccctttgttgcaggtgtaataccataggtatttttatgtactcctgttaaaatattgcgttcttgctccggtaaagagttcatactcaatgcagatattgttctcttatctccatgtaaacctcttgataagttgaaagcgtaagtatatctcttctgtgcatcagtagaaatatcactaacacctttatcgatagcatctctggtgtaagactcaccaagaagtttgttataataaaccaacttctccgttttactatttctatcagcatcaaccgtaatacctttctgatattccgttgacttcaagttataagaactattacccctatatattttgtgtacttcatcactgaaagcacactctctatctactacatttttaggattgataacattttcaccgctattggtaagaataccctgtactggggataatatatcatcttctattttattcagctgatagtcctctaaatgaatttctgttgatacattgattttctctggtacatctatttcaagtacaaatacactgtatccatctccatttttacttccaacacctactgtagcatttctcgttgtactcttcaaagttgtgttttcctttgaaagcaactgttcaacttggttctgatatgcttcaataccaaacatatctccagcagtaatactttgtgccaatttgttccaaaatgcttctccagtgtttccatcggaaagtttatatgttttattggcatcactgtttgctaccatagctaaatagtatcttgagctatctaccttgaaagttccttcttcagctaatgtgtgttccacactatcatggtttcctatggaaatctttccatttaagttctcatcataggaaagtttggcataactgatgtatgattttactggcttcgttttcactaaatactgaactgatacacctaatttctgctcctcaccagataaagcgatttctcctttacctgctgttaatccgtcagcactctctaactcagcactagatacctgactcttattgttagccaatgcagtcaagttatactgtaagtttatgggttctgcctgctcctttgtccgcatgttttgtatcagtttatctgatactttaccagacagtgcagactgtgcaaggaagtgagcagtatcttgtggggttctgtacttgtaaactggtttatgattacttcctgcgttaaagttaccagaacttacactggttatttgtgcttctgtgtcaccttcaagctgtttacgcaaggtatcaagagtttgctctgtcatcttaccactaccattgactaaaaatgcaccataggcactgattgtatagcccttttggtaatcatctgtaatgttcgtgaccttttctggaacgctgttggcgttctggctaccccctatgaagcctttggcttctgaagtaccatttaccaaattttcatctgctatcatatctccctgcttctgcgatacaactgaagctcttgagtccatagcatagctaccattatccttttgggttgctcttactgtgaaactggtagctgatttcgtgttaccctgccaactaagaccaagcacaccaaaaccataacgataattagttccttgatattttctagctaatatctccgccagaccaccactcttattatcaatcggcttattattgatatcgtgcatagtataatactgtgctaactccgttagacctactgtaccattggagtcaccataaggtacttgcctgtcagaatagtggtttccagtcacatcatagatagtcttgaatacagaattcagacctttttccacaatttcatttgccgttgggaatgaaagatagccccctccttcaaagcctattatcggagtgattaccaacactccagtttttgaagtaaattcttcttttgtaataccacaggaaacccctttacttgacaatacagaagtaaatctgtcatagaactcagctctcttcgtagcgtcataaagcataccctctggattatacacatctgagaagtttttattgatgtactcagcaaaagcttcaaatctgaaatgagcatgtacgtctggactctgctgtccagataatgcaccctcatctaccatgtttcttagagtgctgtctaggctgttagcatctacttccagtagagctgcagcttcttgtgttgatacattggcattacttactgttaccagttttccgttatcaacgataaattcttgggcatcatttaccaaatcatttctattagcagaagtactgtaaatgccatctccattctttaaaactacaacaccagcacctcctcgtgtgtaacctgcataattgccacgattgatatctccttcagtgagcatatcagctcgtcttgcaagggagaacttcacaccataagtagcgtaagtgccattgcccgtaactgcaccatcattgataccgccagagctacttccgcctgtccattccgctctcactgtttgtcctaacagcaacatcaatactaaagcccataacggtttcttaatcttcattgtgccaccttctttccttaaattgtgcagacagggcaagaattttatctttataagataaaaatataccccctacgataagcaatatacctgataaggttattgctacccagcttactcctcccgtctgtggtaaaaaggtagtgcctccagtaccatacatactcatgttaatgtcctctgctttatcaacaaaaccagttacttcgattgtttttgatacttccacaccagaacttgtagtagctgtaatcttatacttcccattatgactgactgagaatgtatactccttacatggtgtctgacttgactctccatttaacatcaacacactgtcaatactgctataaactgttattggaaaattcgtgcctgttagaataccattaggtaactcactgtaagaaatatctggttttacatcggatatctcttcttgcttaggactcgataactcatttattttgaagtctgaagtaatggttcttatattggtacgcatactcaatgtaaaagttccattcatactaatcggaaatactcttgttactccttttacagtgttaccagtgtctatatatttctttaaggcttcctctgaactaagtacaatacttcccttagaatcctttatatcaaagttcataagatattctccgcctaactgttctggatatttactaaaatcataacttacagacacattagcctgggtcttatcatcagacaatgaagaactgatactgatacttggtgtctcaagaaacgtaccatcataaagtgcatcggcgacttctgttgaattgacatccatgttacctaaatattctccttgcggagtaaatactaaaactgtagttggtgcttcagttcttagtggaaaggatattaaatctttacaagaagctttctggatctcgccagtgtgctttttaatgtactgtgacaacgatttgatatctgacaaactatcgtttgttcttatgtatccccatgtgtactttccgttatcagaatactcaccaaaagaaacactagatactttatctgctgtcttagtaatacttggtgttataaagccttcctctcctttagtgctatctatataccctataaaaataaggtcttcattcaataaatatcttccagaagatacttcctctttaaatggattttttatcttctgcctaagaacatctaagttctcattcactttaatattgaatgatacttgctcctctggcttggttgtttcctcttcattaggaacagcttctgttgaagtgatactggactgctcatctttaatgttatccatgttctcagatgccccttcattggaatgctcctttagagtttcctctgactgctccgctgctaatactatctgtgacgaataaagactacttgatacagatagtgctaacagcatacatacgattgttctcttcatgcttaacctccttatgtaattttcaaagttccttacggggaaaaactgcatacccccctttttaacgcaaggtgatacaactatacgttctactccttaccttgcacaaaagaatacaatgacgtataggtttgtttaattctcttggatacttgctatgtttactcttccacataaccatcgcctccctctgtgctgtcaagatatttctgatatgctctattgacatcttcttcttcaaatacacgaactccgctaggtaggcgtctgcatttcaattttcctttacctacccagtttcttatagtcgtatcactcactccaaagagtcttgctacatcagatacttgatacataatttcttcctccttacctatgtcctttcctcagactgttagaatttactcattaaacctgctatctccgttttcaaatatcatctgcaagttggaaatttgcccgactgcggaaaggctatttagtttgtacagttactatataattatctcttctaagtagttgacaacattgacattgtttatagtcttgacatcaatgtgccatcactttgcagactttcataattcaaaagagtctactcatgatgcgttgagtagactcgttgactgataggagtaaaatagtcatctgggtttgttaaatatatttgaagagttgtaactgtacatcttactttatttgtgtatcagcttgatgtctttcatatttatagaggtctttgaggtaaactatgaagaaggacttatcttacatcaacactactcctatcagtcgtaaaaagtacagcaaaaacaactcaccagtgataaatagcatcactggcaatcttcattttaaaaaaatctcgttttaatttacatctcacttttatctcgatttcatcaaaaaatccttccacagtatctctcaaaataaattcacttttctccacagtaaaatcctcaaaaacccttgattttgctacattcttcggcatttttctttcaaaaattgccacagaaaaatatacgattttttaataaaaagctacacttcaattccattttttatctttaaaaacttactaaatttctgattatcttttcataagttggtaaatgccgatatatcccgtattttagagctttatcggtattttctttttggaagataccttgcataagctggcatttaccagcatgaaaatgcaaccaaaagtagtaaatgagtagtaaatataagctccgatattaacaagccagtctttccagctctgcttttgcagattgaaatgtaccgtgtgcgtaatagccaagtgtcatggttatgttagcgtgtcccatgagatattgcagggtgtttgggttcattcctctgtttgccatattcgtacaataagtatgtcggaatgaatgtggtgtgatgttcggtaacttgtctgtgtgatacttgttatacttcttaatcagtcctcgcaccatgccctcatagtttcctgcaactttaggtaagccctcacggttcaagaataggaaattgctgtaaccacctacaatcagcggttgtgcttttcctctgttctttagtattctttggattgcttgataagcacgttctgtcaatggaagttcccgttttccatttttggtctttggcgtttcaatatagtagcccatttcgctatctttcaataactggtggtctatattgagtattctattctgcatatcaatatgcgtcgtcaatccgcaaaattcagaaatacgaagtcccgtttccagcagaagcacaacctcatcataatacttgctgtaaatcttgtccttttccataaaggcaagcaggcgttcttcctgctctggtgtaaggataactttctgctccgtatcatcttccagaacatcacttagcttaaattcaaacgggttctttctgatacagtcgtcttgtatcgccatgtaaaatgacgctttcaaggaacgcttgtagttatcaatcgttttataggcatatcctttttcgctcattctgatagcccattctttagcgtccgactgcttaacagtatcaatcgccctcatacccaacgggtcatttttcagagcgttcataagatactgtcgtcctttttcagtagccctcttgatgttctttctttggctgttcttcttgtcataaagctggcagactgtcattttaccaccgactgtgtcgataccgtcgttaaggtctttttttatctgtgcttctttttccctcaacgatatatcatcacgctttccagcaggtgtcttgtctgtcggtacaagtttccaagaatagataaattgtggctttccgtatatatcggtatatttataaacgtatcttccgtcttttcgctggctctctccattacgcaaattgcgatttttactgtcttttcgtttcacattagacatagtgtaaagctcctttccgtcatggaatgagccgtgatacgctatatcttattataccatatctacggctcaatgacattagatttcgtccaatgtatctatgattttttcaaattgttttcgcttaatctgaatacggttgccgttcacgataacccagccagcgtcaagattttcttcggctaatttacgcaatttcttttcgccaatgcggaagtatttggacgcttcttcaaccgtcagcgtatatttttcccaaataggcacatcagtattgttcataatctatgcaccccctttactgtgtgtcgttttttacaagcaggcagacggctttggaaagctccattagtatctcaactattcccattcttgtgggcagaaccgcaccatgcggacgtatcattattctgtgaggataggtcgtggcaaaacaacttttccaacagtcgctctcggatcactgcgtgggtcgctcgctttcttttgaaaaggtcgtggcgtacagtccccgtggctcgccatctcacaaacgtatctgtctgctttattcagttgtcaaagagctgtggcgaaagcgtgttgctttcatataaaagcaggtggcagagcaggaaagagggggggatattaaatcatgctccgctaaaaactgcttattcttctggttctaagtccatatcttcaatatcaaaacctaaaatcattttgataagtgcttctctgatacgtccttttaattccatgtctacaacaatataaacattgccatattcgtcataaagtgaacgtaaacagcactttgatatgtacgggtcataaaatgccagcaatttctcaatcgctttttcgtttccgtccatagctgatgaaatcaagtaataggacggctttttaaataactgtttcattttctaatgttcctccttgagtatttttttcataatttccaaagcgtgatgtcgatttctaaatacaccgctttgcgtgattttctgcaagttggcaatttcactttctgtcatttccaaaaagtaatacatcaacagagtattgcgttttctttctggaagtttcttcaatgcttctgccaattcatcatcaaggacacgaatatcaatgccacatactgaaaagattgtataatctgtttcgtagtcgtcccaaacagtcattttatcaacaatgacatctggcaattcgctgaaagatatttctttatttttacgacggtttaattccttgtaataatctttcacgacactacgaacaactttctttaaacaactttcaaaacgacattgaactgttttctggaagtcagacggtttcatcaatctcacctcctttcctttatgatttgaaaagtgtttatccctctttccgcaccatataaggacagctaggtgtgatttaatgacctcttttgaaaaatttttaagtttttttcgggtatgaaaaaagcccgcacaaaacatatagtctgtacgagcttttaaagctaaataatatttattttttaatagtgtactgttaggtggaattaaattgtaaagaattgcacttaaaacattccataactcaagcccccttacagcaaaatactatgcaatgcctaatcgaacttattgaggaaattttaaagtttctaattttcttaaaatcaaggattttgtttgttctcttgaatatcccatttctgctaattcatgcagacatttgattatctgtaaatctgtttcttctttcatttttgttattatacagcagttatcttttgtaacaaaaaaatcatttcctttttttacgattaactctttctttctcagtattttataagataattgaattgtatgtttactaacatttaattctttacttaaatttgttattgaaagtagcttttgacctgcttttaatttctgttgaaaaatttctcgttctatataatttgatatttgttgtgcataagggtaaacatcattaagatataactccatgtgtatcacttcctttgttttatcatcaataagcaactattcaatgcttaatgtaaattatggactgttccttttgggaatgtaattgtcagtcttgtatattccgtttctttagaagtaatatccaatttcaaacctagtctatcagataattttttcgataaatacagtcccatgcccgttgcatttgccttgtttctgttagaaccagtaaagcctttttcaaatacacgggataaatcagacgtttttattccacagccattatcttctatcacaagcagtatatttgttccgttgtcttgactgtatatcgtcagtttgttttcctgcttgtcaaaatacttaatcgcattttgcacgatttgagatagaatgaatgtcagccatttttcatcagtatatacaacattctctatgtcatggatattgataattactttcctttccataagtgaatgacgaaatttcagaatgacattatgtatcacttcgtctaactgcaactgttttacaaaatagtccttttccgtattttcactccttgcatagtagagcatttgttccaccaactgaaatatcttgtctgtttctttttttaacgtgtaatttttcgtattatcgaacgtcaaagacaatgctcctatcggtattttaatttcatgggcgaaactttccacatattcttgataatcctgcttttcctctgtgattttaccgatttcatcattcatagatttgcaggctttttttagtgcgtagtaataggcttcattttgaaattcttttggctttggtaaaacatctgcaatatagtaggtttcttccaatccgtctactaaatcaataatatgttgcgaagccttacgtttcttccgatacaaacaccattgaaaaagcccttgtatgctgatgaacagaattaccagcaatacaacaaatagcgtatctacaccgtagaaaatcaagagaaatgctactaaggcaagaaagaaaagctgaaacaatatctctgttattttttcttctaagaatgtaaaaaagctcacagtttccaaccctttcctcgtatattttccaataaatgaacaataccgatttctttcattttcttttttagacgggtcatattaaccagtaatacattttcgtctaaataatatttgtcgttccacagcttttccaatagttcttccttactgataactttatcttcgttcataaagaagtagtataagatacgaaattcatttcttgtcagttcaatgcttttctcttgatacttcaaaatggataaatgtaaatcaagggtacaatcttttttgacaagctcacggaaattgttcgggtttgataactgcaatgcacgcttgatcttctcaagaagaataagcgtgtcatacggctttgtgataaagtcaattccacccacttgaatacttttcaattcgtcagcatttgtatctctgcttgttacaaagataataggtactggcatagcttgttttattttcctgcatacttcatagccattttcatacggcaggttaatatcaagcaaaaccagctctacgcaatattgctttaattcctctgtcagattttcaaagttagtcaacaagactgtttcatatccttgtgtgttcaatagtttagaaagctccagacgagtgatttcatcatcttcgataattgctattctcatttccacacccccttgatttaccattataataattccacagcaggagagctagaaaaatctaactctcctcattgatatttcgtttgaaaccgatatacgttgctatccaataaattccatagataaagaagaaaatcgccaaacctactacgaagtaaattaaataactatactcactttctaaataaattttataaacattattgactgataccagcataaagaaacttgcaagaattgaataaataactggaacaccaaataatattagtaattgctttctgattgttttaaataatgatttatcattcactcccaatctttttaatgtttgatagcggtatttgtactttgtagagtcacttagtgattgaatagcaagaactgttccaactgccgaaatcaaaataaaggcaatataaagacaaatgcttgcaatcatagcggtcatcgtattttgttcttcaatagcagaacctcttacagaaagtctataatattgtacgactgtttcaccatcatcatttactattactaatcgatgtttcaaatcttgtttgattttttctctaagttttgtatctgtttcttctatggtatctataatcagatgttgctcagatacttccaagccttgaacatattcatcaggcacaataacagcaaatcttccagtattatttatttgataccaatacgtttttgtatcaatgccctttagttttaattcttttccacttgtcaactgaattttttcaatatccttgttgttttcaactttatataacaaatctttgctagttacaagaaaatactcgtcattacttaattctatggtgtccatattctttaatttcagtatttcgttataatcacttaatttcattactgggtcataatcataaaattgcacgtcaaaataattctgcatttgatgtttcggttctttataaacatcaaattcgattgctttatttattgtataatcttcatcaacaacattcacatattctttaaaatctttaaatggttgtttttcttcaaacacatgaacatcaaacggagctgtcatttctatgcttgctttatacactcctttattgatacttgaaaaatttaaacataacaaagaaagtaatatcaacatggaaagtgtcccgaacgtaaaactcattgttcttgcttttgacgcaaaagttcttgttacaaaaaggttatctttttgatatttaagttttttatttttcaataaaaccgacaacaacatatctgcacaagtagctgatacaccataaatactgataatcaacatcatcatgctaatcatcaaatacgtaagagtttcttgtttaccgctgttttccattgtccaacgtgaagcccaaagcaaaatagcagtaattcctaatataacactaacaatgaaaataatatttctctttttattgctacggaacattttcttttcattctgcttatcaaaataaagaaaatcatgtaccgtcatttttctaattcttcgtaaaagattaagcagaaccaatacgtatattgccaaaaagtaaatagcaagcaatcctatggaaacaaaatttattgaaataaagattacttctggaatacctaataagtttacaattaccaatgatacaaattgactaaatatgaacccaagaggaatagccaaaaccaaagcacatatcgctaataacacattttcaattacaagcaatcgagcaatttctttttttctaattccaagaagcatatatgttccaagctctttgcttcgcttttcaaacataaattttgtggtgtagttaatcaaaaaacagataacaaatataataacaacattcacaaaagctagaatatacttaaacgtatccatgcctgtcgataattctattacttcttcagaacttgccactaagttaaaagcaaatataagagaaaatgcgatagtaacagttatcaaataaatcaaataatctttaatgcttctttttgtatttctaaccgctaatttacctaacatttcccacttcacctccgagcaaggttaatatatccagtatttcattgaagaaatcttttctgcttttttcccctctgaaaatttcattgaatattttaccgtctttcaagaacaaaatacgtttacaaaaagacgcactaaacgggtcatgtgttaccattaaaatagtagcctgcattttcttgttgatgtcagacattgtttccagtaacaatctggaagattttgagtccaaagctcccgtcggttcatcagctaatatcagtttcggttcattgattaaggctcttgcacaagcacaacgctgtttttgtccgccagaaacttcataaggaaatttcgataaaatatcacgaatacccaatttatcagcgatagcatgaactcgtttgtcaatatcagcagggttctgtttgttgattaccaatgacaaagaaatgttttcttcaatcgttaaggtatctaaaaggttgaaatcttgaaaaatgaaccctagattttcacgtctgaaatcagcaaaatctttatctttgattttggtaatatcttgattgttgactgtaatgtgtccgctggttacggtatcaatcgtagagatacagtttaatagggtagtctttccagaaccactagctcccattattgcgacaaattcgcccttgtctacatacatagaaataccgtctactgcctttgtgatatttccagagttacccccgtagtatttttttacttgttctaaatttaaaatgtgttccattaaaatcgctcctttcttcctgccacatttatttgttttggaatacgattaaattatagcaagggcagtattcaattacacttacagttttgaaagtaaacagagagtaaaagagccgtgataatgcagatcacaattctgtgaagcattttcacgacccgttactttcattgtctaaaaaattacaattacaaaccttttataaatagtcgtaagaaaccaattcttccataggaatacgtgtagcaaaatgacgttctgggtctgctggtgtttctttcccataaccaatgactaatatattgactggttctaaattatctggtaattgaaattctcgtttgattacatttggtttaaaaaagcatacccaaactgtacctaatcccaactctgttgcctgcaacatcatgtggtctgtcaaaatagtagcgtcaatatctgttgtctgtttgttatcaaaaggtcgtttccacgcttttgaatggtctgcacaaacaataattgccaatggagcattatatatatttccagcttttgcaatgcttttcaatcgttctttgtcctgcaccaccaacaatttaactggctgtaagttcgccgcagttggtgcaacatgagcagaagcaagtattttatccagcttttctttttctacgggcttatcttcgtatgttctaacggaatatctcttttttgcaatatctaatacattcatttttttaatctcctttgttcttgtgaattaggtcaacctatactataattatatccgtaatagtctattggacaagaacgcactattttgtaatatactacctaaaaagaaagtgagagaacatcatggaaaataattgttgtggttttagttgtcccgttgaagcaaccattcaactaatcggcggaaaatataaagcggtcattttatggcacttaatgaataaaacattacggtatagtgaaattcataagctcattccaaaagcaacagacaaaatgttagcacaacagcttcgtgaactggaaaaagacggattgattaaccgtaaggtttatcctgtcgtcccaccaaaaacagagtattccttaactgaatttggaaaaaccttaacaccaattcttgatgaactttgtaactggggcgaaaattatttactccaaaactgattgtaagccgtgataatcagatttctcgctgtgagttgtttaccacggcgtttttatttacagcttaacttttgtttttttcgtaatcttgtaaatatattcttctggcgtaggacgtttattcccaaaatactttttgaaatttgcctgcacctctgggtctgtactgttcatagcttcatcaatcgtcgcttcaatatcagcccgtatatcagctaaagacacaccgctagcatttgcacctgctttcaatgctttttttatatctcgttttttaagtcctatcaaaatatcactcctaaattaaattttctgttacaccaaatgcggtatatttcctttcaaatataccgcataagaaaaaataaatcaataaatgaactctcttgattatcctacaatcttccagttactatccttatgtagcacaagctcatactgtgatacctgcgttgcctttgtctgattatcgaggaatttcacggatactttgactttcacattgcccccgtcctttgtaaagatagggtttaccagttcagaataaaggtagtccctgccgataggttcaagcacatttcccgatacatagtaggcaagttctttttctgtggctgtcgggtacagcttaaagaatgtttccagaaatgcggcagcgtcattgacagtatcagcgtccacgcttgcgtcggtttctggtgttttaggctcatagtctgatttttcgattgctggtgcaagggtagggttctgcacgattaccatattcccgtcagcgtctacatggactttcacggtataagttgccttgacattgcttgtctgttctccgtcttttatctgctgatctacttcgtaggtggcagaaaaagtgtccgttcccgactgttcgatactccacacaatcacatctgtaaccgtggagctggtcggtatatccattctgattgtatccacattcaagtcctgcaattcctttgtcagataaccgctgattgcctgcgtccttgcttcaatcacttctttgctgttactccatgtgtaataggacttcgcaaagttctttacgaaattttctatcccgttggtgtcctgcaagcgaagctcaatgatttctttttcatgggtggtgtgctggtcgatagcggtaaaattcttatacaccccaaagctcacgcttgcgataagcaccacccacaacgcaatcacggttttcttatgtgtgcctactttgacagtacgcaccattttttctttgacattttctgtctgtttcttattcttcttaaacatattttcaagtcctttctattgttttactcgtcctgcaccgattaagtgctgttgccagtaactactgcttaggtctgcatatcctatcgggtcgcctgcatgatatatctggttattccctacataaattgcaacgtgcgttacataagtaccagcgttataggtagaatggaaaaacaccaagtccccagcctttgcctgcgaaagaggaagatgttgggtagcgtcatactgtgcttgtgctgttctcggtaaagagataccagcttttccatagcaccattgaacaagtccgctacagtcaaaagaagtgttgggattgctaccgccatacacatatttccagccttgatattttaacgcttcattcattaccttttgtgccagctctcccgatacctgcggaacagttaaatactgattgactaattcgacgtagaacatatttccatagccataccgccagcccccgttcttcgcaacggctatcgggttggtgtaggttactttctttccacccgatttctcacgggcgaaaatctctgcaagattgtatgtatgtttctttcctttacctgccacatagcccacatagccaccgccatagttataggactgtatcgctacattcaaatcgtcgataccttgatttttgcaggaagaaagcagggacgcaaaatacttacacccctgcttgattgaactttctgtatctaaggaattaggcggtaaaccaagactttccgaactctgcataacatcttctgccgtaccgccactttctacttgaatgatagccagcaatacattgacatactcggaaataccgtattctttggcatatttttccaccataggctgatgtttcaagacttctgctgataagttcatacccgtaatgccagaagaaaaattgctgttctcgtcgtcgctgtccgcactaatgaggacaccaaagaaaagcaccagagaaaagaggagaggaaacagactgccgataagagcgatatgtttcagtttcattttttcttctgtcctttcttcgttacaaggttacgggttttctctgtggtctgctggttcttctggacgctctgggtctgctgaacctttgtcctgcggtctttggtgtaattctggcgtgtttcctgcgataccactttttctacattctgcctatgtgctatctgtgccgactgggtcgctttcctatcagaagcaccagaagataacggacgctctttgataacagttgtcttgactggctcacttgctttagaagtggttgctgtggcaggacgtttgacttcctgcattttttctgcactcggctttggaatggttgaagctgtggctggtcgctcatggggacgggtagctcccgttgtcgctgatccgtcagcctttcgctgtgcctgccttgcttcttgtgccttttgaagctccatacgcttgtcagcgatattctgcctatgctgttcttgcctttccaagcgtcccgtttgtctggacagctgttcctgcaccatgccacgcttaaagtcggacacgctggactttgccttttcctttgcggaatacaccgcataagcggtctgtgtcggcatatccttgatattctctttgacagcatttgccttgtctttcactttatttttcgtatctaagacagcccccacctttgagcctgcacgctgtcccatgctggaagtagatgtattgccccgactgtcttttgtggctgtgttccttgtcggttttctgtttgaaatcgtgctacctgccaccgcaccagcaacaccgccagcagtaaccgcaccagcaagccgtctttccatacgcctagctctatgtcgcataaacagatatggtctgcggaatatcctgcgtcccatgttttgactgtcgccagcgttcaaagagaacatactcattaagtcgcccagcttcatgtagataccagcgaaacacactatctgtaagaaagctaccatgaaaaacggatagtccgtggatatgttataaaacatactggaaatgctgaacgccaccgttacaatgagcgttattccggcccttgtcattatggtattaaacacccttacgattgcctgctttgccatgctttcatagctcggtatcatagaaagtagaaaactgataggtaaaaacattgcaaagataataaaaagtatctggctaaacaacatcatgcccgtaagcaagaatacaaatatcgttatccctaaattgaagaacagtaggaagaacaccatacctaaacggttcacgacctgcggtatcgtcagattgttgttgtcgttgtcctcgatttctgttttcacgacttcctctctggttttcccgtcctcgtcctctgggcttgccgatacaagagcttcgacacggtctgttccgatttcctctgcgttgctgttaccgaattgcagaagtagccacggctgttccacttgaatagaaaataggctgtcccgtatcaagtccacgctgtctttgccctcgctgtcagagttggggagcatgatttttgttcccaagtccaaagaagcggtactgatgtcgcttgaaaactcatttatctttttgatgtagtcgggagcgtaggcaataaatgaagcggacagcacgaacaccaccacaaagttgataacagcgtgaagtgccttgcttgtttcccgttttatcagtcccgtataagcaacataaagtcccaccaccaagataataagaagcaggaaaccgacataaaagcccgtggaagaaaagccgttctgtgttacgcctgcaagggtctgtatgctctttccgatactgtctgccatatcgttaataaaatcaagtttataggcttcctgcaccacatagcccgttgtattactcaaatataaactgatagtccagacaaagttggtaatgcaataaagcccgtactgtactgattttccaatcccgtccagccagttccacggaagccatgaccagctattatctacataaaaatcaagctggtagttggaaaggggatattttgagtaaagattttctgcgtttatggtatcgtccacaagccccgtcgcatgagccaccgtccccagaagtgaaagcaggataagggagagtgccacgacaaacagagccattttgagaacgtgaagtatcttcttttttgtgaacgcaccttttatcctttctttcatcactccacctcatttctctgtacgggcggtctggtatcaaaggcgtgtagcagttcttcaaagactgggtgtatctgcaccacaccgacacgcccgtataagtcctgcaataagcattgtccgttttccaaatcacgcaagcgtttctggttgttctcatcgtccttgtcgataccgaaaaactctaaggtctgttttatctcgttgatgtcggtgcttctaaaggcaaacttcaagccgatattgtttttcagactttcttttgacacgtccccagaagattgtgtaacaaaataaacgcctgcctgcatagcacgtccagcacgaaccagcttatttgataaagtttcgccttgtgccacgtttaagaacgcccacgcttcgtccaaatcgacaatcttaaaaatgcttctgtctgaatggataaaatcaagagcaaaggtactaatcacaatcagcatagacaccgacaataattcaatggtcgtgtattcctcaaaggtcgtgtccttatctggcaatactaagtccgctacttgaatgatattgagctggttatcaaggctgatagcattttccaccgtaccgtctgaaaacagcaggtgtgcaaagtcgtagtccgtgaagctgtcgatatggtctgcgatatttcttgatactggcgtatcttcacggcgtaactcgtctatcacatgaagcaagccccgtttgtcgctctgggtaacggaacgcaccgccttacgaagtacggggaacttttctccgtcccttgaagaaatacccgtaaggaatgttaagatgtcgattgccagactttcagcgtcttttacattcttcataatcacaaacgggtcaagaagtcctgcattgtccttgtcgctggtaagatttacgatattgatttcatgggcgatttctggaagtgtttctttccagttgccacgctctgattttgggtctaagataaccgcttgtcccccaaaaagaaccgaataatacaccagaagattgttgcagaacgacttcccaccgccaagcgaaccgacaaaagcagacgcaagggcgttggtaactgtaccttttataccttgactggcaagggacggttgcaggtacacatttcttcccgtatcaacggaatagcctatatagatacccgtagtttcccctaactgctgggtcgcaccaaagccaagccctgccaagaagtctgattttacatactgcacatagtcattgatatatcgcttgctggcaggaagaaattcagaatgaagccccagcatatccccagcaggacgcaccagctttacattgaggtcgtcgtaaaagtccttgacttcatcacaacggcgtttcagctcgtcaagatcgggtgcagacacccgtatcacgtagcttaacttatacatactttctttgctctggtctaagtccgtttccagctcgtccacgctgtctaatgcgtccaccacatttgagcttgtttcacttcctgcttgataagcgtgattgtcaaggtctttcaattcctttttcttgttgcggacggttgttaatgctttacggttctccacgatttctacattcatactcgtatcaactgggaatgtgaattgctgttgctggaaatagaagatttcacttgacggaaaatcaagctcgcctacaatcgcattgacggtaaaataggacacatagctttccttgtcctcatgttccaagcgtaaataccgctggctttcttcaatcacacatcttgtcggacggataaggtcgtagtattttatcagcgtttctttcttcaatttcttctttggtaactggtactcataatcttcataggcgataccgtccctgccgtaaagatgttccatgagatacccaaaatcgtcgatttccaagcgacgcaccttgaaacgacgtgagattttattttccagtaacttttccattttcatgtagcggttgatttcatcattcggcatggaaacaaagtcattcatcagcgtgtggttcacttcatggagaaattccgtgagcgtcagccacgccgattttttgatgttcttcagattgagctgttcttccgtaaccatgagcttaaagccaagaaaaaagcggtagtccacttgattgtccccaatcatagatactaacgcttcggtctgttcgtctatcttctggcaggcaacttcctttaattttcccgttaccagtttctttgactgttcctgcatactgcggattgagctttccgtcgctatctgcaaggcatgaattttaccctcacgggactgtgcgataagctgtcggaaactgtcatgcacgataaatttctgctctgcggataagaaagaatagttgtacggtatcaattcatagtaagcaaacacctcattgtccttgttccagacaaggttattgtcaatatattttatcgggaacataattcacactccttactgccgtgattgtttcattcaatatctgcttatgcagttttacggcttttcctgcataagtgattttcggtcttatcgcataggttatctgtgatttcaaaaagctgtacggcttctttccgtcaaaggtcttttgcgacataaaccaagtgagagcaacgggaataccaaagtatttgagaaatgctccctcaatcatggaaagtgggggaatatccccaaacagaatgatgataaattccgtaatcacaaaccatgtaatctgtgtaaaagtaacgggaaagggtaagttaaagtcattgattgcatacaagactttttccacgttccagatacccgtgtagcttttaatctttttcaagttctttcagctcctttcgtaaatttctaaatggaaaaggacagccattttcagactgtcccttaaaagagaaatatgctgtcagtagcaacaatgcttgtcgctgatcttccagcgttagtatggtatctcgcacatacctcggcttgtttcaatgaagcaaccgcccatatccaaatctcgcccgtaggcttcatagtcaatgtagttctgcaagctgggtggaatatcccctagtgcctgcaattcgtctatgtagtagtaggcaacatctgtcatggtttcacagtcgggataataataaatatcgtccttgtgttccacgacttcttccagcgtcccaaagtggctgataaattcgtccagacactctacgatatagtcgggaagttcctctatcatttcatacatatcattgagttcttcaatggaaacatactcgccaatcgcaatcgggaagttgtcggtatcatggattgcgtattcctcatactgttcatttaagccgattttttcttttacatcttcctcgtcaatggggaacgtgaaccaagcaccgactaaatagccctcattgtatttgccaagattagcaatgtaaaccgccatatcatcaatcataagcaccacctcatttcctactctgacagttcaaagataccgtgttccgttactaaaaatttcccgtgttcctgcaagtgagaagcataggcttcaaagtcaaaatagtattcttgacagtcctcggataaatgtttgaacgtcgggtcattcatcagcttttgccttgcaacatctatcatgcttttgcagtcgggataaaccgtaatcacgttcctgcaaatataaagtgcttctaaattttcatacaccgcaagaagtgctgtatattcttcctgcatatcgcttgaaagctggcggtacataaaatcgaattcgttgagctggtacacgcttgtatgttcgtgaacttcatcagcaaaaggcaaccccttttcgataatacggtaatcttgactttctgcaccgacacctagcttttcttcaaactcggcaacgtctatcggcagttcaaaccagtatgatactgtttcttcgccagttgttcttcccgtttccaccagcacccttgtttcctgcattgttcctcacgtcctttctgttgtttcatcacatcttttaaggtctggtacgacataccaaacacatactttgaaaaatcttctaactgtctttcttcatagtcggcagggttcagtcgtttcatttcatgccacaccttacgcttgtaagagggcaggtcggaaatgtattcacagccgacgtttgcctgcatatccttaaaaatatcgttcatttcatcactccaatctgaaattttaggtaagaaaaaagcagtcaatcctaagactaactgctttgtgtgtatagatataatttgattaagttttaaaaccagcttattttttcatctctaaattgagggctatcgctgtgctgatatggattgtagttattcaaattgcaaccatattcttttaatgatttgattttgttatcttctgtccattcaattaaggaaataccgtcaaattcttcaatacttcctgtattcatttcatttttaaaataccactctacaacagtttgatttcccttatgaaagaactgcttaatatcccaaataataactttaccacgagtattccattcattaaaccaatgttttactgttttaaggttttcatatttaggacaccagctttccgtataaacaacatcttctgtaaaaattctatccattcctaaatcttgctgtttaagccacatatcgaaccataagcgaatgattttttctctctcattcataatagaacacctcaatcctaagactaaatgctttgtgtgtagggatatgaaattgtaaaaattagtttattattctactttctttcttttcttttttgctataataaaacctattatcattactatattcataagaagtacaattatgctaccctcaattttacagctaccaccagataaaataggatttccactaattatcatgttgagtagatgtgggtaatcttccgctaatgatactccaccaagaattattgcaccaacaccattccataaaaaatgaattatgataggtgcaatcaaagaacccgtgtattccaaaactgctgtcataaaaaggctcatggtaataacatttaaaaccggaagaactcctgcttcaaaagcaccagcatgagcaaatgtaaacaatcccgttgatactataatagctgataaaatattgtaattgctctttatcatttgatacaaataaccacgcaccaacatttcttgcataatggtattgataaaagcagaaagtaaccataaccaaatcatagaaactgaattgcttccatctaattgtattacacctatgaaagttaatattcccaaagacacacctaaccaaattgtcccaataataactcccagtataagattgtaaacaggtttatcaatcaaatgtaattttatcttttttttatctatcaaccaaaatatagctgttataccaattattgataataacggaaataactctgcccaaaatctccaaatagcaagatttttagttgcaggtataggcataactcccacacatacagcccaacccataaaaaagataattgttttcaatgatactgtgactaacttcttcaaatgatacacttcccatcaatcttattttagtattttacaaaactgtattatatacctcttttttattcaattcaatatttttatgcaccgataatcttattgaacagctctaacagtacatctttcacaccaccagcattgaatactaagccgacagcaatcaaggcaactaccaagaagccgataagtttggaaaactcacgcttgaaccctaagtagataccgataaccacaatcgccataagcactaagctctgtgcgtttgataaaaaccattgatataaattttgtccgaaattcatttaattgtcctcactttcttctaattgtttcatttcacagtcagcttctttgccgacattcaaaatacacatcaagactacgccgatacccattcccatagataccagcaggaagtcttttaataatacccacattttttattactcctaactttctactaaatcttttgcaggggtcgtctgctgtttgattatcatttcatgcttttctgtgagctttgcctgctgttcgattgtttccatgtagtctgtaccgtttcccttatcaatctttttcagcattttcaaggttggtgctacctgcctttgtacccaccgcaatgtgcggtctaaggtgtaaggctctggctttgtcgtcagcttcaagctctgtctgttatcgccgataaaccaagcccagcggtcattgagtttccagtcattttttcgcttgtcgggttcttcatcaacaaatcgtacatactgattgatgatagaaaaggcggtctgctctgcgtcataataggtcagcaaatctcgtactgcataataggcacgttcatttctaagccgtatctcgaaacggttgataatatcggcttcttcaagcggtgtccccagcttgacatactgctcatagtccttttcatagatacagaaatacacatctgatttcagcgaaccaagataaagggtacgtcccatatattctctgtcgttctctctgtgcttgataagctcgcccgactggtaaaacttataacttctggactttccgatatattcccgtttcctgcatttttccgcaagctctggaatatccaaaatgcccgtatggtcgttgatagctaggtcgatacgcttcatcacgccaccgtctatgagtgcgtccatgaggaagtcataccagcttctttgctgtgccagcaggtaactttcaaactgcctgcaacctcgcccctttaactctaaaaggacacctttttcttcgtcagccgacgtatagataaagatgtcccctaaagaataatgctccgtatagctgtaatgtccgtaatcttcatggagcatataattgatattcagttttaatatatctttgatgatgtgctgtatatccagcgtgggaaaacgaattttcacataatcaaacagcatggtaagcggtgcttctggattgaaccttgccagttccttattcaaagtttccagaagttcttttgacggcttcatttttccgctttctatcttgttaagatattctcttgtgataccagaaaccaccgccagcctgccttgtgagataccgtaagcaatccgtttctcccgtaattcttttatccattgttcttcattcagaaccatacccccaatctgtaaagtgtgaagttttttaagacgacttcacagtcgatttttgctaggaaaccatgccagaagccttatgtttcctatgttttttgtcttttgtccatttgcaaacgtacccctctgttagataccgaggggttttacctgctggcgtggcttacgccacaccagcaacggctagtccgtgccgtcgcctttcgcttcgcacgtcgccgtcccgtcctgccttgcttgtgcaagagagccgatagtctgcaaaaaatcatgtcctttcgggactaaaggcgtgtaaaactcactgataacgcttgttcccacatcacagtagccacgccccttgatacgcttctggaaaaactgctttttcacatctgaaccgaacagcataccgtagcctaattcgctgatacgaccaagccccacacggaaattgaagttatctctgataccgtccgagaaatactttgcgtctggacgctggcaggcaacgataaggaaataacctgcttgtcgtcctaacataacgattttctttaactggctaagtaagcccacgctttctttcgttcccagcatttcaaaaaacgccacatattcatcaaagataagaaagcagggtggcagtcccagataggcgtagttttcgcccgtcttatagtctgggtgtcgcttcatttcctcacttcgctgtatcatgccctcataaaaagcattgacgcaatcaatcatttcttctttggtgtgatacacatttcccataactgtccccaagtccgcaaggtcagcgttcttcgggtctaagatgtaaaggacagcgttggtatgtagtaaggcttcaatgagcgtcagcagaaaataggttttaccgccaccagttccaccagcaatcagagcgtgagggagtgcgtcatattcccagacaagatttttcatcagtctaagacagccgttttctgcccgtacttcatcaatggtaatgcggttcgctatcatatcataaagcagggtatattcgatatagccgtcatgcagggtcttgtcggttagctcacaatacaagccactttccaatttatcctctaaccgtaaaagctggtcttgatatttccccagtgtaatttcacagcggatatgaagcaagcctttttccatttgatagtaaatctttggaaaccagacgattttttcccttgatctgctttgcaggtcagtaaaaaaaccgctgtcttgtacggtatcggcttcataccacttattttccagtatcattcttgccagcttttgacggtgcaggagcttcttgaaattgtcataacagaagcggtaatacagaaaagcgaccaatacacaagcaccagtcgctatcagtatggctatgaagttgtaaggggagagcgtgaagccgttttctaacaagctgaaatgctcccaatcggtacgcatgagctgtttgctattcagtagcaggagaaccgccacaaatacaaacagaagcgtccctatggaaaagtggtagacaaggtgcttgtcgctggctctgatacggtgtcctttgttccaaatcatacgcataaataaatcactcctttctgggtactaaaaaagcagtcaatcctaagactaactgctcactttattatcatttatttaaaatcttcagagtctaacactttatatccagccttaattaaagcctgtgcaaatagaccttgaccttttatcaatcttcccgtaaaacttccatcataaatattctttactgcacaagttgggcttcttgattgcagaataactaaatctatttgcatatttcttatttcatttagagccaactgtactgcatgacggtattcattatcaacaatatttccatttgtgtccacaacaacaccatttactatttctgcactaggacgtggtgtaggcatgtttgctaataactctggacaaatttcgataacctctttatcttttaaaaactcgacaacttttgtattaagattattcccaccgttgtatttacagttttttcccgtaatacatgaactcactaatactttcataatataagcacctcacaatttataagaattatatcattccgctatatacccccacaacactcaaaaatcatttaacccgaagcctaacttccttgtatatacggctatgaaattgtaaaactgaaattcatcataatttctcccctaaagcaaactaccttttaacccttttttgaaaaccaatacagctctttctgtccctaaaaatgacatagttataagccgataactttctttttccatttctgatatttttttatttattttatcagtaacattttcaacggtaatttcttcaatcagttctgttttatacatcatgcttctgcctccataaactcaagatttatcttatctcatgtctatattatagcagttacatatatctgctacaatgaaattctaaagtgtttgcgtcaattcttcgcctgtccctgcggggcatggttctatggattgacaagctccatttaatatgattattcatatttttttccaacgatataggttacaactaacagtcctatcagtagaatgactatagctggatattttacagtatcccataatgaaacaccgccaattaaaaaactgatatagcagataatagggtatagaatagcaatccccaatgtaaatactctaaatactgttaatacatatccccagtttgcattattaaaggataaccctgccatgtgtattctaaaaattccttgtgatacaaaattaactttatctgtatcataatatgttggtaataattcttttgcaaaaatgcaaagccaacttgcaaacaaaagcattaacaaagatatatacaaactatctcccatttgttctatggaaattccagaaacggttaataatattgcttctacaattaccacaccgattgagataagaaatgcaaatatccaattcttttttcgttggcgaattgtattacgcaaagataagtctaacgaatttacaacaaggttttccacttcatcactattcagtgtcttttcttctcttaatttttctcctttcaagagttctgtcactgttattccaagcacatcagcaataggaataagtagtgtaacattaggcatactgtttccacgctcccatttactaaccgttttatcggaaacaaacagcttctcagccaattccttttgtgtcatttgtttttcttttcgtatctcggctaaaaattgtccgaacttttcattattgatttgatacatttgttgccacctcctaggcttattttaaccatttacgataaggtaggcaatctactaacaggagagtccagttatttctctaacctttgaggagaatttttattttttcggctgtccctgcggtgcatggttctgtggattgcctgcgttttgattgcttttattcttcaacataatatcctctgcctttacataccagtccacatctgcacccgtataggtttttcgtgataccgtatcggctactggattgacaagctccacgactgcattgtactgaaattcccttaacggtacttctggcggtacagatacggggataattccaccgtgtagactgcacttcaaatcatagatacgctttttaagctgggtactcggtgtcccgtcctcattctgcaagaacacatcacgcaccgctgtaaattttaattctccaaatgttttctctttgtcaataacaaaaccgtttgataatctcataaattcttcactcctttacttttcttcaactgctacaatatcgttagcaactaacacataatcggtatgtcccatatccccgattgcgtaacctctgccgtataatttcggattgacaagttttactttctgctcatacttgaaatgcttttcgccagcctgcacgggaatttctatcacaacattttcgcctttctgtacgtcagaataaaggttatagcttcgtctggctaaaaccctgcggttatttttatctctttcaaagactggctcgctttcgcctgcaaattcaagagttccaaaagactgtgccatatctggcacgacatatttcatttccatagtgttttacctcgtttctttctatttttgataagtttattgattgtgatttcttattctggcggttgggtaaataccagcaatcccccagatagtaaagggtaaaatcaatgcatacgcacccttgactatctgtgttcttgcaggtaagtagcagacaagccagaataagcaaaagtctgccgtttgacagcttcggcggagagcgtgatttttctttcatcataccgttaccgccttatgatttcttcattttacggcgtttatagaagaagatacctgccagcccagcaccagaagtcacaagaagtgcaagcagtccgtaaaggttggtgttatcgcccgttttgggactgtcgctaggtctatttggcttctctggtgtctgtggtgtttcgggtttctctgggacttctggcttttccttaaaaataatcgtctgtccctcgtcctcaatgtccttatgttcggtaactttcttcggctcgtctggattgctcaaatcatataattcttcaaaagttacaagctgtttgccgtcaagagaagtagcgtcaaaggtaaaggcaacttccactttcatagtttcgctgtcagcggtaaacatataatcactttccacacgctttccattgataagaagctctgcattttcttctttcaacatctgccagcccacaagtttgtactgtgtaccgacttctaagccctctaaggttacggtatcaatgattgtaacgtctttttcagcttcaatctctttgttgccgtccttatcggtagcggtagtatgtatcttgatgatacgctctgtgataagtaccgtttgcccgtcgtcctcaatgtccttatgttctgcaactttcacgggttcgtctggattgcttaaatcatacaattcttcaaaggtaacaagggttttgccacctaaagcagacgcattgaatgtataggaaatttccactttcatttcctcatcatcagcgacaaaggtataatcgttttctacacgtttcccgtcaatgataagctcggcattttcttcttttaacatctgccaacctttcaactgatactttgtaccttttgtaagtccgtctaattttacagtatcaacgattgtaacctcttttcctgcaaggatagtcttttcgccgtccttgctggtcgctgtggtatggatagaaatttctttttcgtattcatcagtcagcgttcctaaatcaatcacaaggttatttcttgataccacgatttcaaaaggtgggataagttcaaagcctttgttgctttcagagcgtaattcctcgatgatgtaggtatcataaggtaacgcacccttgctgtcgtctggttcagaagtcccaaaccacacaccgtcctcgctggtcttgcctgcgttggtattatgcttatgtgaagcccattcagcagaagtggagaactgcccgttatcatcagttaccactacatgattttcgcccgtcgtcttgcttgtgatcctaaacggaacatcagcaagacgcttgtgtgtgcctgcaccgatttttacaccctcaatatcccctcgcttaatctgattgtagatagaatgggcttcgtcggttaagtccacgatttttccattttctgtgattgtaaaatcaatcgtttttgcaccgtcagttaagtaaccgtcgggagcttcactttcaacgatacggaattttccataaggtaagaggtcagcagaagtagaagcgacaccctcaatatctgtacgaattgtctttaccacttcatttttcttgtatagctttccctcaactaaaacagaattatcatttaaggaaatgatgtcaaaggcagtatctttcaaagtggcacttccttgtggctttgtatcgcccgtttctaaatctcgtttctgaattttgacaccgccacggataaccttgtctgatacggaaaactggttacttccagatagtacggcaaggtcgccgtcctcggtaatctgtgttacatataagcccttaatctgttcggacttatcgccagcctgcatatatgcaccgtctaacaagtagccgtttggagcttttgtttcttcaacggttagtgtcccaagtggaagaaccgctttaccgtcctgcatatagaagctgtcgccagataccttgtatgcgtccgctaattttgtgatgtagtgggttgtcccgtcgctgtctgtttcagcgattgtctttgtaacccatgtacgagtagtttcggcaggaagattgtctttagtatagaagcctgcataatacttccatgtaaattccgcacctgctagagaagcgttcccttgcggattgtctttctgtgtttccatatcaatcttgaaaagctcaatcaaagtgtctgttactttcggtgtatctgatactttcaaggtagctgtctttccagcttcaacctttaaggaatatacagttttatctactttatatcctgctggtgcggataattccttgatatagactgtgccagcttttacctctgcaacatctgtattgccgttttcatcagtcgtaagggtggcaagctgtttcgtgcagtccttatcagaaaagacaccataggttgcacctgcaatagagtaattcccgttactgtctgtaatgctggtattactggaagtcttttgcagtttcgcatttccgacattcagcttcgcccagaattgtcccaattcctgcccctcgccagagtagatataaccgccacattcatagcgtcctttattttctttgacaaaggctttcgcaccagcgaaaacttcgtcctgcgttgcctttggaatttcatcataagaagctcgcacgttatcacattgccagccaagatgtacgcttaatctctgccagactacaagctgtcttaaaaggtaagcgtgatttttgcctattccgctgtggctgtctgtgtactgttttacatattcgatagataaggcaacgtcgcttatctggtcgatactcatgcgtgagcttgcgtcagctctggtcttgtaaccattcttaaagtctgtgttaatgtcaatacagtaagcgtcctcgccctcaacagttaaatgtccctcattaaaggtagaaccaatcgaaccgtcattcattactttttcaacgataccgacacgctcgtttgactccgtccagtattgcttactttctgcatgaacgggtgtagtcggtaaagcagtaacgacagttgcaagagctaagaagcccgtacacaatcgtttccatgtctttttcataaatctaatgctcctttcattttgggtaataaaatagccgtccaataagaacggctggaaatagaaaaggaacgtcattttaggcgttccatagtctataagttattcaattttttcttgtttcaatactgatgtgctgtaccatatctttgcatatctaggaaaacttgcgtatcaaggctcattcgttagtagtaaataagtagtaaattgatgtgtttgtttccttgaaaatgctgatagatactgtgttttagcggataatcagatttttattgtgtttttttaataaaaactacggataatctctatatttttctaaaatctgcttcaaaaaaccacttctatttttcatttctttgctacaaaaaaatatctgcttttatttattttcactacatgaatttttgaaatattctcaatatctaccacaagaacttcatcatatttacttgcgtatgctacacgaaatcatttctgttttttatttcttgccactcatatttgaaccttttataaaaaatgtgctacatagttctgcaagtattcttagatattgtctacaagcatttcctcgtttttattcatttccgctaccatacttcaatcattttcattttttcttaccacgaaataataaacttgcatacttatggtctgactctgctttgtatttgtgtacatcctaatcagccattttttactgtagtcagctaaagtttaagcatggtttagattttatggtcttgtggtttgcattttacagactttaggtcatcgtttttcttagtgagataaggcttttttcactgggtttacaaaaaatcagtgtggtttgctaattcttgggtttacctactgagtcagaatatgtacggcagagatttttctctgccagaagtacgtcttcttacagattaaaaaatctccaaaaatattttttttgataggagatagtttattatgaaaaaagtaaatgtaaacattactaacacacaaaaggtttcttttgaagaaatctgtaaatcaacttctgtttctaaaaccattaaccgcatacctgctcttgaagcagaattcaaaagagtcttcggatatgattttacaccttctgtactttcagatatgattgctgaatgtgataaaaaagaaatcaaaaaactcttcaagaaaataaagactcgctatacaaacaaatattacttaaatattgttcttacaagtgcaacaagcagagctaatatagtatcgaagtctactcgtttatctataagtgattgggcatttatagactccgttatgactgatacggaaaatgataaaacagacactcgtggactgagcaattttatcttcttccttgcgtttttaattttctgtaaaactagaaacaaatctattacaaaaccagatatgaaagacttctccagtcctatctttcatgtaatgggaaacaaactgtggtttaaagatagcttttatagtatgtgtgaccaactgcttgcagaaaaagatattgaaactactttagatttatttggtggtagcggtgttcttactggttatattcaagattattgctataaaaatagtcttaatttggagagcagatacaacgatcttgataagaacaaacataatttctttaagcaattaactacatctccaaaagaacttgagcgtaaatgtaggaaattgcttgaaacgtatgattattataatgataagggagatattgaaagcatattaaaacttaaagaaaatgcggaaagtcttatgaaccaaaaaggtcttcatgcggcggctgccttttggtatgtaaatacaacaaaccaaaatggaaacgttaataagcaaaaatgtaagtcactagaagaatttgtttatgcttcagagttatacaaaaaggttatctttgaacaaagtgatgccttatatcgtttagacaaatggtatgataatgaaaacgcctttatcattgttgacccaccttatccttatacactgggctatttacatctactggcaaatgatgatttaactttaaaaaatcatatacaactgtatacgaaactgctaaacgcaaaggcaacatgggtatactttggaagaatagatgcatcaagaagtcatataaataatcaagataaaaagaaacttgcttgtgatgatgcacaacttctctcattttttgatgacgcctttcaaaataaaggattattttatatggatagaaaagttaataaaaatactgaacgcattgtttcaaattatccgtttgagggatttaagctttatgtagaggaaagagtatcttcttcaatagaaattgaagaaacagaaaaagttgtactttctccagtagaagctgaaaaaccaaaggaaattgtgccttctcctgtagacgctgaagaaacagaagtaactgtatcttctccagtacagattgaagaaacagaaactgttgaaagcacagtacatacagagtctttccatgcagaagaaataaaaactgataatcatgaaactattatcgaagaagataccaaaaaggagcataaagaatgttgcgtaataaagtttttccgcaaactgtttcgttgcagagaatagggatttctgacactagccaatgcttaggcacttggctagtgtctcgcataccccctcgttatacacgctgtagggttgtataacttatatccattgaattatctcaggtcggaacaggagatagttctgaagggctatcagtgcgtcaatgggtgttttttatgggtgttagtgtgtctttgaatggcaaaaaaatagaaatcggctacaatttcatctgtaaaaccgatttctactctattttttataaaatacaggataccttactttcccacaaatccagtaaaatcaagggatttaggcatctttttctaagccacttaagcgtatcgcttggtctgctgcgatcaaactgtcaatcacttcatctaaatctccgttcaaaatgctgtccagcttatgcagtgtcaatttaattctatggtctgtcacacgtccctgtggaaaattgtaagtacggatcttctccgaacgatctcctgttccaatctggcttcttcttgcctctgcctctgcggactgctgtttttctaactctaattcatacagttttgaacgcagtaagcggaatgctttctctttgttctgaagctgtgatttctctgtctggctgtaaatcacaattcctgtcggataatgtgtaagacgaactgcagagtctgttgtattgacacactgaccaccatttccagatgctctcattacatcgatacgaatatctttctcttcgatcacaacatccacttcctccgcttccggcatcaccgcaacagtgattgtggatgtgtggatacgtccaccggactctgtttccggcacacgctgtacacggtgtactccactttcgtatttcatccgagagtaaacgccctgtccacttaccatgaatacgacttccttaaatccaccgattccattttcattgacagagatcatctctgtcttccatctcttgctctctgcataatgcacatacatacgatatacttctgccgcaaacaaagccgactcatctccaccggctccggcacgaatctctaccataatattcttatcgtcgttcgggtcttttggaagaagaagaatcttcaattcatgctctaattcctccacacgttttttcgaggagctgagctcttcttttgcaagttctctcatctcttcatcagattcgatttcaagcatttcctcactatctgcgatagactgttttgcttttttatattctgtatatgcctccacgatcggagctaaatcagcctgctctttcatcagcttccgaaaccgttcttggtcatttgcaacatccggttcctgaagttcgcccatgatttcctcatagcggatcaacagatcttctaatttatcaaacatatctattcctccatttctctcatctattgtacatgccggataccacacggtcaagtcccgccagatccttttttaccgttacctctgtaaacccggctttctccatcatcttcgcaacatcctctccttgatcatacccgatttcaaagagaagacaaccaccctgcttcaaatgttcccggcttttttctgtaatctttctataaaaatataatccatcttcttttccgtccaatgcaatcatcggatcatgcagtcttacttcctcttccagttcctcaattgcttttgttcggatatacggcggattggacacgatcagatcatatctctcagcaacttgttcaaacagatcgcttttcagaaacgtgacatcagcatttaggctctctgcatttcttttcgccacctgaagtgcttcatccgaaatatctgccccgactgcccggatccctttccggtaatgttccagactgatcaaaatacatccggaaccggtacacatatccagcacttgttcgtttccactcaaatgagacaatgcttcctctacaagtatctctgtatcctgtcgcgggattaacacatgttcattgacaataaatggcaatcccataaattcctgctccccagtaatatgctgaagcggaatcctctgcgcccgcctgctgatacagtcaaaatatctttccgccgcttgctcttctgcaggctccgcttgcttcagataatacatcgtcctgctgattcctgtcacatattcgagcagataccaggcatccagttctgcctccgcgattcttgcctgcttcagacgaaaaattccttctttatatagttcctgtatcgtcatactgatccccttttaccaatcccgttagattttgtcatctcttttgcaatcttctcattgattttgtccacatcctgttctatggctcttccgggaaattttccttttggtatttcttccagtcaaagactgcttctaccgaacagattgccacttcgatcatatcatcatccggctctttcgtcgtcagattctgaagcgctagccccggcttgcttaacaattccacaactggatgctctgtgtttcctgcaagccggatgatttcataagaaattcccgcgattaccggaagcagtgcaatccgcagtaacactcttaataccggagactctgttgtaataaaaaagcagacgataatactgacaaacagtacgaaaaacagaaaactcgtcccacaccgcttgtgctgtttggaactttttcttacgttctccacagtcagatccataccatgctcaatacaattgatacacttatgttctgctccatgatacatgaacacgcgctgaatatccttcatcttcgagatcagcaggatatatgcgataaacagaacaatcctcacgattccctctataacagtcctggcaaatctgcccggcacaaacggtttcaaaagatttgacagcaagtaaggaagaaccataaagattgcaaccgcgatcactaccgaacatgccattgtgatccccataatcaaattctcctgcttctcctttttcgccgcttccttctcggttagttcttcctcctcttcttcctcgaagaaacttgccgaataagagagtgtcttcattcccagcacgagagaatctacaaaactgaagattcctcgcacaaatggaatctttgtcagtttcttccatttgacaatcccatcgtatacttctttctgaagcgcaatctctccgtccggttttctgaccgctactgcatactgatccccgttcttcatcatcacaccttccagaaccgcctgcccgccaatatttgatgacttcatagattcgctctccttctatttttcagacagatttccattaattctttccctctgtcatatctgtacaattctctacaatgttaaaaaaggttgagatttgcacctcaacctattctcgtcattctgattattcctgaattccgtatttcttgttaaatttatcaacacgtccacgagcctgagcagctttctgctgtcctgtgtagaatggatgacatttagaacagatttctacgtggatatcttcttttgtagatcctgttacgaatgtgtttccacagttacatgttactgttgcctgatgataaactggatgtattccttctttcatgattttcacctcttcatttttatttcgtgaggttatatcgccctcacagcgaatatctttgcaatcatcctactatcgtaatgacagaggaacgcttgcttattatttgttaaacagcttttttattgtatcatacttattttcacattgcaagttatttgtaaaaatcattagataatttttgtcttctttaccatctggataaactcttcgttatttttcgtgcgagaaaacatatttaaaatattatcgactgcctcctcgctcttcattccatttaaggcacggcgcagagaatatactgcttcctgttcttctgcacttaacagaagatcttctcttcttgttcccgattttggaatatcgattgccgggaacactcttttttcttgaagctttctgtcgaggacaagttccatatttccagttcctttaaattcttcgtaaatgacatcatccatcttgcttccagtgtctacaagtgcacttgcgagaattgttaagctgcctccttctctcatatttctagctgcaccaaaaatccgcttcggcatataaagcgcagccggatccagaccaccagatagcgttcttccactcggcggaacggtcaggttgtatgcccttgcaaggcgtgtgatactgtcaagtaagatcatcacatcttttttatgttctaccaaacgctttgcacgctcaatcaccatctccgacactctcctatgatgttcaggaagttcgtcaaacgtagagtaaatgacttctacatttttcccggtgatcgcttccctaatatctgtcacttcctctggacgctcatcgatcaaaagaatcaggatgtgcatctctggattgtttctcaaaactgacagcgccacttccttgatcaaagttgtcttaccagccttcggaggagaaacgatcattcctctctgtccttttcctattggagaaagcaaatctacgatgcgcatcgccgtagagctttttggatgttccaggcgaagtctttcgttaggaaaaattggtgtcatatcttcaaaatttgtccgtctcgccgcctctgccggacgcattccattgaccgtcgtcaaatataagagtgcgctgaatttctccgactgtgtcttgattctcgtatttccagtcaggatatctccagttttcagattaaatctgcgaatctgtgacggtgatacatagacgtcattctctcccggaagatagttatcgctccggataaatccatatccatccggaagcacttcaagaatcccctgcgccgtaattccgctgtccagctcctcaatatcaatgacccctgttttctcgctttttacctcttcttttgcttcttctgctttatcctgctcgtcttttttcagcattaattcgatgatatctgcttttttcattgtcgataccccttttaatcctcgcgcttttgcgatttccttcaaagacgttaacggtaatgattcatatttttctctcattatcctacttcctttcgctattcatttgtctatcctaattattttaattattaataagtatctgcgggaatattcgtctgacatgacttctcttaagatatacgcattatacactatttttagggaaaaagaaagtattttttcagcaatccttgttgatttgatttcaccggaatgttatcataactttagaagtttcaaaaatatgaaaaagaaaaggtgtgaataatatgacaacaaacgaaaaggcattacaaatgcatgaacaatggaatgggaaattagagatcagtgcaaaagccaaagtaaattccagagaagaccttgcaattgcatatacaccaggtgtcgcagagccttgcaaggtgattgcccaggatcaggaagctgcttacaaatatacgatgaaagccaatacgatcgctgttatctcggatggaagtgctgttctcggtctcggaaatatcggcgcttatgcagcaatgcctgttatggaaggaaaagccgttttattcaaggaattcggtggagtcaatgcagttccgatctgccttgatacccaggataccgaggagatcattcgcacaatcgtcaacattgctccggcatttggaggcatcaatctggaagatatctctgctccgagatgttttgaaattgaggagcgtttaaaagaacttcttgatatcccggtatttcacgatgaccagcatggaactgccattgttgtccttgccggcatcatcaatgcgctgaaagtaaccggtaagcaaaaggaagcatgtcagattgttgtaaatggtgcaggttctgccggaatcgccatcacaaagcttcttcttacttacggtttctgccatgttaccatgtgtgatatcaatggaatcatttccaaagattctccgaatttaaactggatgcaaaaaaagatgacagaagtcaccaatctggaagggaagaagggaacacttgcagatgcattgcaaggagctgacatctttgtcggagtatccgcaccgaatattgtcacaaaagagatggttgcttccatgaataaagattctatcttatttgcgatggcaaaccctgttcctgaaatcatgccggatcttgcaaaagaaggtggtgcacgtgtcattggaactggacgttctgactttccaaatcaagtcaataatgttgtcgcattccctggcattttcaaaggtgctctggaaggacgtgccacacagattacggaagagatgaaacttgccgctgctgaggcaatcgcaagtctcgtttcggatgaagatttaagcgataccaatatcctcccggaagcatttgacccacgtgttgccgatgtcgtaagcaaggcgattaaggatctgatctaatgaagcgctggggcgaaaagagataccactctctcgattatcacttaaaacatacttacggtgaaaagctctataaacttgctttaaacggcggaatgacttgcccaaaccgtgacggtacactcggagaccggggctgcattttctgcagcgccgggggctccggtgatttcgcaggaaatcctcgcgaatctatccggcaacaaattgcatccggcaaagagcaaataaagaaaaagaccgatgcagtctcttatattgcctattttcaggcatacacaaacacttatgccgaagtcagttatctggagaagatttttacagaggcaatctcctgtcctgaagtcaagattctctccattgccaccagaccagactgtctggatgacgaaattctcacacttttagcacgtctgaatcggatcaaacccgtatgggtagagcttggtcttcagacaatccataaacagagcgcccagtttatccggcgcggatactcgctttccgtctttgagaaagctgtcagaaatctccggcagattggtgtggcagtgattgtccatacgattttatatctccctggtgagacagaactgatgatgcaggagacgatttcttatctaaatacaatggatattcaaggaatcaagctccagcttcttcatattctacatggaactgatctcgccgactattatgaaacttcccctttcttcgtcccgacaatggaggaatacatttcatttcttggaaagtgtattacgcagttgcgtccagatatcgtcatccaccgcctgaccggcgatgggccaaaagaactgttgattgctccatgctggaccggacacaagcgtcttgtcctcaacaaaatgaatcaatatttcaaggaacaggatctttggcaggggaagaactacaaactatgattttagaaaggatttgcgtacaatgtcagactcatttactttgtacaaattaattgttttatatatgcttcagaaagtggatttccctctgacgaactcacaaatctccgaatttgtcctcgacaaggaatacacgaattatttcacactccagcaggcactctcggaaatggaaaatgccaatctgatccgtctggagaaagaacacagccgcaccttctatcatctgacagaagaaggcgctgagacgatccagttttttcaaaacaagatttctcctactattcaggatgagatcgacacctttcttcaggaaaagcattacgaactgaagaacgctgtcgctgtgcgtgcagactactaccgaaatgataatcatgaattttctgttcgctgccaagtcacggaaaatcacggttctctgattgacttgactatcacagtaccgaccgagcaggaagcaaaaactgtcgtccaccactggaaacagaaaaatcaggaaatctatgccttcgtgatgcagaatctattatagattgttttcttctatttctaaatctgttatggtaaatgtttttacagacaaaaatcggacaaaacaacttttataaggagattttacaatgaactatcagaaaataaatgctgaagcaatcgatacctggtgtctggatggttgggtttggggacagcctatctcccatgagctttatcaaaacgcacaaaaaggggaatgggatgttcttcttactccgacaaaagctgttcctcatgaatggttcggcagtctgtgtggcaaaaaagtgcttggtcttgcaagcggcggtggacagcagattcctatttttgctgccctcggagcagattgtaccgtactggattattcttcccaacaatgtgcaagtgagcagctagtcgctgacagagaaggatatcctgtaacaatcattcaagcagatatgacacagccacttccctttgaagatgggatatttgatctgatctttcacccagtttctaactgctatatagaaaaagtagaacctgttttccaagaatgttaccgcattttgaaaaaagggggagtcttgcttggtggatatgatctcggaatcaactatgtttttgatgaaaacgaagagtatctgacctattctctgccgtttcacccattaaaaaataaaaaacaatatgaagactccatgaagtatgactggggaatccaattttctcacacattagaagaacagatcggaggacagttaaaagctggattccagcttactgatctatatgaagatacaagcggtcaggggaatctacacaaacataatattccagcttttgtcgcaatacgctctgtcaagcgataagttgtcggttccttttcgattaccagatttcctttccatcggagcaaataaaaaatctgtcttgacaggcaatattcgccatccaagacagatttttattgatttggtaggcgaaaaatcgtttcttcgctaagcagccttacctgtaaaaacactttatttccctttgatccttcggaaatgctcctgaatctccttttcatatcccatatccgaaggctcataaaattgcatgtctttaatctcctctggaagatactgctgctctacatagtgatttggatagtcatgcgcgtatttatatccagttcctcttcccaggtttgcagaacctttgtaatgcgcatcctgcagatgagacggtactgtagtcttatgtgcccgcaccgctgcatttgcagccatgatcgcatttactgctgaattactcttaggcgctgtcgccacatatagtaccgcctgcgacaagatgatctgggcttccggcattccgacacgctccaccgcctgcgccgcggctaccgccacagaaatcgccatcggatctgcattccctacatcttctgatgcacagatcataatccttctggcaataaacttcacatcttcccctgcatacaacatttttgcaagataaaagactgcggcatccggatcggatccgcgcatacttttgataaatgcagaaatggtatcatagtggttgtcccctcccttatcgtagcgcacaactctcttctggatacactctgatacaacatcgatcgtaatgtggatctttccatcctccgaccgctccgtcgtcaataccccaagctctatcgcattcagagcatttcttgcatctccaccacaaatatctgcaagaaattccagcgcatcttcatcgatgatcgcatgataacttcccattccacgctcttcatctgtcagcgcccgcatgatcaatctacggatatcttctttttccagcggctttaattcaaaaatactggagcgggaaatcaacgcgccgttgacttcaaaatagggattttccgtagtcgctccaatcaggatgagcgtaccatcttctacaaacgggagcagatagtcctgctgtcctttgttaaaccgatggatctcatcgacaaacaagattgtcttcttcccatacattccctgattgtcttttgcctgcctgacaacctcctccatatctttcttgcccgcaactgtcgcattgatctgagtgaaattggcactagtcgtattggcaatcacctttgccagtgttgtcttcccggttcccggaggtccataaaaaataatagaactcaacttgtccgccttgattgcccgataaagcagcttatcttttccaattatatgctgctgtcctaccacttcctccagagtcttcggacgcagacgcgatgcaagcggagactcttttttctttgtcgtttctctcatataatcaaacagatccatatcttttcctcctatgaaattcctgccagatcacggataacctccccggcaatgatcagtcctgccaccggaggtacaaaggaaatacttcccggcagtgaacgcttatttcctttttcttcttccgtaatattttttgagacatcgaccggcttttcttttgagtagagtacttttaaatgtgctactccccggttcttcacttcctttctcatcaccttacagagcgggcagacagatgtctttgtaatatctgtaatttcaaataattccggatgaagcttatttcccgttcccatactgctgatcatcggaatccctctctgatcggcaatctgagcaatcgcaagttttgctgtcactgtgtcgatcgcatcgacgatataatcgatattcccatccaaaagctccgctgcattctcctcaaggacgaatgtttcatggactgtcacttctgtttttgggcaaatatcctgaattctttctttcatcaccctcgtcttgtattgtccgatcgtactgtgataagcaatcgattgccgattgatattggtcagtgatacagtgtcattatccaccaggatcaaatgaccgataccacttcttgccagcgcctcaatacagtgtgatccaactcctcccacaccgaatacaagtactgtcttctcctgcaaactttctacacaatcttttccaatcagtaactccattctggaaaattcatttatcatcttgttactcctttatctataattgttctctcttctgttattcgcctgcatctccggcagattcaccatttccctctccaatcattctatgggaggatcaactcttccactgtcacaaattcataaccactctcttttaaaatatccacaattctgagagccgcattcacagaactttcataacagtcatgcattaaaataatatcattttctttgacttccgtcactaccttgttcacaatttcatccgcatttttcgtcgtccaatcaagcgtatccacagaccagtttactggcaaaacctgcatctctttttccagacctttctgccatgccccaaacggcgggcgcataaacgacaccggctcaccggtaattgcagaaattttttcgttggtcatccgaatctcttccatcgccttttcatctgacagttttgtcatctctacatgatgaaacgtatgatttccaacgatatgtccattttcgtacatttcctttacaacagtctcatttccgtctatattggatccgatcagaaaaaatgttgccaaaacctccctctcttttagtccttccaaaagtttcggcgtccataccggatgcggaccatcatcaaatgtaatcgctatctttggcttctccactcccgccgtaatagctccatcagcctcctcagcctcccgaccacttcccgccttcaaaatcaggcataccaaatataacatcccaagaaattgcagtatagattttctatgcaaaccactttccctccccctcttgctcatatcatatatatgaaccacaataaaaaagaatgtgtccccgctccatgtcatacacattctgacatttccttgaaacacactctttctttttggacttccagcagatattttttgtcctgtttcttctatctatctttccgggcacgctgtgtcctgttttcacttttcttggaaggattctgtgccttctttttatttttctttgaaggattctgcgccttgcttttattcttctttcggatactgtaaccaaatgtccccagttctctcccggtttctaaataggaaccatgcgaatacgcaagaagttctgcctgattcagttcaaacttcccacctgcagacatataagttccatcgacctgtaccgcctccaccgtcgcaagaaacatatgatgagatccaagttcctttacctctgttactttacactcgatattgacagggctttccacgattgtcggtgcatagcgaagtttttccgcttttcctcttgtaagccgagtctctttccacttatccacatccctgccggattttactccacaataatctgtcgcatgcacaagatcttttgtcgtcagattgatcacaaactctcctgagctgcgaatcatttcataggaatagcgttctggtctcacagaaatatatgccatcgctggattcgtacagattgtccctgtccatgcaactgtgataatattggtattgccatcggcatccccgacactcaccatcactgccggcagtggatagatcatatttcccggtttccataattgtttctccatatcctgtcccttctattgctgcaacgcaattacgaaattcggaattaactgtttctttctggaaacaactccctttaagataatgtcttccgtatcttctctcaaatcaaacgcatcaaatacctgctcccttgcacctgcaccgtcacacaaaagctctgtggactcttcaataatattcgttaacataaagaaaatgcgatccaatccctgactgtacattgcctccttcagataaggaatcaacttttccttgatgtcatgcagttcatctttgttcattgaattgatctgcccaacaccgaactccacatctccaatattaaatttcttaaagtcctggaaacatatttcctccgcagtcttattcttcagattgcttcccgcattaaacatctctcttgcaaggctctcaatatcaatatctgcaatcttcgcaagtgactccgccgctcttcgatccacatcagtgcacgtaggcgaacggaacatcagtgtatcggaaataattgcagaacacagaagggatgcgatcatcctgtcgatcataaccccctgttcctcatacatctgataaacaatcgttgcagtacatccaaccggctggtttctgaaatataccggtccgatcgtctcaatgcttccaagtctgtgatgatctatgatttcctggatatctgcctcttcgattccatccacagcctgagatttttcattgtgatccactaaaatcagctgtttttttcttgcatcgatcaaaagccttctcgaaatcaatccgacaaatcttccttttctgtctacaaccgggaaatcacggaatctcttctttgtcatcacatctttgatatcttccacataatcactcatcttaaatgtcgtcagattttccttactcataaaatgctttaccggaatactctgattaatcaatctggctacagtaaatgtatcatgcggcgtactgatcacaacacactgtctttcttctgccagctttttaatcgtctttgacacttccgatccctggcagacaacaatacagcttgcctccatctcaagagcacacagctgtgattcataacgatttcccaaaactaccaagtcatctttctcaataaagttctcgagaagttccgggctggatgctgcgatcacaaccttccctttcacaaaatatccatgttcatttcctgtcacaatcgtaccatctaaagtctggacgatatttcgatactgcgtacgcgctttcgcaagaatatgactgtcatacacatccatataagaagtcgcaatatctccgatcgtgattagaccttctaacatattctcctttgtgatcggcatcgtcttcgtattcgattccttcatctgccgccacgcttctttgatcgacacatgaccttcaattcctgataccctgctaatatcgagatccttaacttgaatctgcacgtttgacagaagtcccggttcttctactccaaatctgtctaaaatatactgtgtctcttcattaacctggccggctctttttgcaacatattcctggccggttactttcctctttaaatttgcataagcaagtgcagaacagatagagtccgtatctggattcttatgccctacaacatacacttttctattcttctttttttctgatgtcataatccaatccctcatcaacaattcatttatactatatagtaagccattttttcttctgttcgtcaaccttattttttcatggaattgttttttttgcatacagtctgttatttttttgccaaaatttttcttttctgtttttccgaaagaatctatgctataatagaagaaaattatgaaaattgaggtgtagagcatgagtgaagaacaatttacaacagaaactatggctgactacgaaggacaatttgacaatgcagatccatggcatatcgtttcaaaatatatggaacaacagaccgatcttccagtcaaaattgaagggatcgtaaatggaggggctatcgcctatatcgaaggactccgtggatttatccctgcctccaagctttctctctcctatatcgaagatcttgagacttatctgctcaaagagattaaggttcgtgtcattgatatcgatcctgctgagaaccgcctcgttctctctgcccgcgagattttaaaagaagagcaggctgcagagcgcgcaaaaaaggtccaggagattcctgtcggaagtatcctctccggaacagtggactctctccagtcttacggcgcatttattctcttagaaaacggactgtctggtctggtgcatgtatcacagatttgtgaaaaaagaatcaaatctccggcagacgttctcaaaacaggggaagaagttcaagtgaaagtaatcggaatcaaagatggtaagatcagtctcagtatgaaggcattgtcagaagaaccagaagaggaagaagaagcggtcgagatcccaaaatcagaggaaatcggaacaaatcttggcgatttgtttaaaaacattcaattataatccctttctaagtaagataaagaaagtgctgtcagcaatggtactctgttttcataaaacagctcccattctgacagcactttctttttatgacactgtattgtctctcacaatttttcacattatatatgcacagtgccacctctttttcaactcatgctacgatgccatgactttttcactctcaaatgccttcacgatcacaccagtcagaattgctcccatcccaaatgtcatcaacagtgtgatcacataatgtagtatcgtcacttcctgtgtcaaaatctcttttaatacaactgaactattataaaccggaatccagtaagaactttccggcgtatttccaaatgaaaacatcgttgacagtccgataacaagaatcaacatgtacatcggcataatatagctgcttgcctctttcattgattttgcaaaaacagataccaaagcaattaatgtagagtataagaaagataatgcgatcaacagcgcgcctaacatgatgatctgtttcacatccatgctgatcttgaatccatctccgatattgcctcccatcgtctttgccatgatcggcatgcaggcaaccatcgccgccacataaatgactgaagaaattcctgtcagtgccatcagtgcaaataccttcccgagcacaatcgaacttcgcttcaccggtgtcacaagcaggctcgccatcgttccccgctctttctcccctgtgatcatgtcaactccaagtcccatagcacctgcaaacagcaagatggtaataaaatacggaagcatcatgccaagtactttgccgtttactttatcttcatctttaatctggattgcttcgctttctctatctaccttaaaaatctcaatctgctccagatttccgactctctgtcccaaaagtacctgtctgtacgtctccagtaatgtccctccaactgtatcgaatgcttctttggaatagtcttcacctggattataatatggaagaatctccgggatctcatctcccgtctgatattctgcaatcttatgatccatattttccgggaaagaaagaagtaaatctacatctcctttcagaatcttctcttttactttctctacctccccttctttgacaggtttcaccttaacctctgccgcctcgcaaaactgttgaaagctttccggttcattttccacatagacaatcggggtatgtccttctatatttgacaacatccgtttctgaaatgttccggtgaccatcaaaattccaatcataatcgccaccggcagaataaataccgaaaacaccatttttttatcccgaaagatacgtgccatttctttttgaaaaatctgtttgattccattcatcttttattccctcctcaacttataaaactcaaaaaatgcatcttccagatcctgcgcattcgtctgttgaagaagttcttccagcgttccttccgcaaccttcgtcccatcgataacaattcctatgcggtcacagagtttttccgcttccgacataatatgtgtcgacacaatcaccagtttcccttcgtctctcagctttctcaaatagtctgtaacatttctcgctgtgataatatcaagcccattggtcggctcatcaaagatcaccacttccggatcgtgtacaaggctaactgcgattgctgctttctgcttcatacccgtggaaagttctttgatctgtttatgtgcaaaatctttgatttcaaaatactcaaacaactcttcttttctttttctcaggttttcctccggaacattgtgaagtcttccgaaaaagtcaaacagataatctgttgtgaactgcggatcgagcttgatatcacttgtaagaaatccaatctttttgcggacttcctccggctcttcctgcacttcatgtcctgacacataaatctcaccctttgtcggtttgaggattgtcgcaatgcagcgaagcgtcgttgtctttcctgccccattcggtccaagcaatccgtagatttcccccttctttgctcgcaagctaacatcatcgactgcaactttccggctgctctttgtctttgattctttcatctgcttcttattcagcttatagatcttcgtaagatttttaatctctatcatctctcaccctccatatcttatacacattcatcggcatctttttgtactaatatattagtacaatactatatggtgggtgctttgtcaattcttttttctacctctttcgatctcgctttctgtaataaatcaatccaagtaacagagaagctccaagcaacgccgcaatgagctttgcgactgtcgctgtatctccggtttttggtgtatccttccttcctgtactctcctctggaagcttctctttctctgatttcctattataaagtgtaatcttttgcacttcttttctaggttccacacgaaacttcattttttctgccttctgatatccgaatggtgcctctgcttccaccagtacatattctccctccggcaacttttcaatctgttttggttctttttctgttttccatttttcgacaattacctttccctgtaaatcttcaatctgaagtacggcgccctctaccggttttttcgtatccgcatccagtttttccacttctatattggtatgttcattttctagtttcaggcaaagtctttgcttcccttcgctgtatccctcttcatctactgtaaattcagtaatctgctcggacagaaggtaccccggaagtgtctttttctcctggatgcaatatgtgccagtctttagatattccaaaagaatctttccatcctgatttgtcacatacattttcttttcaaacttcggcagtttctcgtcctccttcttccaaaccgaaaacgaaactccttccagtggttttccgctctttttgtctgtcttaacaagttctgtcgtcactggcacattcgcaactgtcagctcctctgtcacaatttctgtcacttgatctttgtattttaattcaacttcatactcctttttcagacggacatatccttccggctgttttttctcctttacaacatacttcccgagatacagattttgggaacatccccctttttccgaaacttccaccgtatcaaccagttctcctttttctgcatgtactgtctggtcagctgtcacaatatcttctgcagcaaagatttcaaagacagctcctgaaagagtctccttcgttttttgatctattttctgaagcacaatctttccttttgcacttcggttgctgtaacgaatcacctgtgcctccgcccacgttgctccttctttcacttcaaacggaagtaattcccccttcagatatccctccggcgcttttacttcctctaaataatactgtccctttttcaatttctgtggaaaagtaaattgtcctttcttatctgtcttaaaaatagaagtcttcatatgctctggataatacacttccatttcaattggtttttttctgctgtccagcagcctaaattccactcctgctgcctgaatctgcttcccagtctcctgatccacttttacaacggtgatcggagatgtgatcagtttatcttccttgtaaattcctcgcagcactaccttttcctccttgatcgtaatttcaaatggtctgaccggacgatacccctctggtgtcttcgtttctttcacaacataagtcccgaaaatcaaccttccccttggatattctttagatactgtagtcgcaaacccacgctcatctgtcaccagctttataacttcttttccacttgttttttcatagacagtaaattctgcgcctgcaagtccctgaagggtatcttcatcctcattttcattttctgctaatttcataatctcaaaatctccgcggatgatttcctccttcgaagaaaccgattgataaaaaatttctgctgtctcttctcccggcaacagctctacttgatagatcgtcggatcgatattgtatccttccggcgccttcgtctccttcacctgatactttccggttaaaagtggtttgctttctgccttgccctcatcatccgtgacaagcgtctgaaaaactgtaccttctttgctgctcaccgtgtattctgcaccttttaaagatgcatatggggactttttctcctgctctgcctccttgtctgctttctgaagacgaatgatccctttctgcggcttttcctcagatacaacgacaatttccacttcctgcagttgcacactttgatcaatcgcagctgtataaccaaatggcgccttgacttcccgtatcgtgtaaatcccataggggagcagctttgaaaccgcctctccctttttgtctgtcgtaagcgtatcctgcttcttaccgttcctgtcgaaaatttcatagaccgccccctcaaaggatccctccccctgaggttttccctgctgtgtttctgcgtcaattttcttcaatctgatttttcctgtaggaacccactgcacattgagctgaactggtgctgtcggtgtcactgcatagctgcctactcccataatctgagtatcttctccggttccgatgatcaaggagcgccattcattggtaatacttccgtaaatttccccgctctgataggtttctttcatatctatcggtgctctcaaataaaactgttcgcctccggaaatatgaccgattccagtctcttccgtccctctgctttcatttacaagcaccattttttcccgcagaggaagcgcaatctcattttccggatctcctgacagaaccagactttctgtgcgctgtccttcactgtctatataggccgtcacatcagaatccgaaaaagataatgccgcctccggcactttcaaccctttgatgtgctctaatttccattgaaaatctttctttaagtcttcataaaatacttcgttttccagacctgttccgtgaaacgcggcatcaaaatcataatctgcaaaaatccatgagaggaacatgtgggaatatgcatagcgctcatcccacgacacaactccagatatttccggatccggaatctgccagaatccttctcctacaaccgcttcccccggctgccccgttgaaaaataaatggcttttgcaagcacttcattgttttgcagaacttctcctgcataaatcccatctgccggcgtctcctttgctggctgcagacaatatcctacattgccattgatataaaataaatttgtagaatactgatgataataaatctctcttcctgtttcaatcgttacttgctccgtctgtgcttttgcctccttcggaaaacacagggcagtacaaaaaagcattgccgcaatacatagcaacaccatctgtcttccttttctcataaatgattcctttctcttttcaaattttcttccaatcactctgtctaaaatagaatcgtacaaaaactctatccatccgtcgattctatctgtttccaacaagcataggcatcacacttctttcatcatcaaattaaaaacatactggaataactggcagaactgcctgatccatgtaaaaagggaaagaatctcccttagaattactctttcagtgtaacatatctattccgaaagtcaatatccacttcaacaaaaaaacaatctatggcagctatcattttcttcgactaccgccatagattgttttcatttctctctcatctgtcgttttcgctatctgtctcttttctggaatccccgccgaaaatcaattcaatctttgtccctttgcctagattactgctgatctgaatctttgcatcgtggagaagcgcaccgtgttttacgatagaaagtccaagcccagttcctccgttttcccgggagtgactcttatccacccgataaaaccgctcaaaaacacgttctttttcttcctctggaataccaattccagtgtcttccacaatgacctttgggccttccagtgtatttcctgtccacacactgacttttccgcctttgacattatactttactgcattttcacagaggttataaatcatctcatcaaggatctgacggattccattataagaaacatgttctcctgacacttcaaatcgtacgctcttcttttccgcctgcggagcaagccttgtgcatatctctcttacaagcagatagagatctacctcttgcttctccagctcaatgctcttctcatctaacttggaaatcttgataatgtcttccacaagtgtgatcagacggctcgcctcattgtaaatccgctctgaaaagcccttcatatcttccggccgcaccagcccatttttcataatctccgcatatcctgaaatagatgtcaatggcgtcttcaattcatgggaaacatttgcagaaaattctttccgcatctcagccgccttttccttttcccggttctgcacatcgattccctgcaaaagtggtgtcaattcttcatacacatcattctcgagcggatgttccagatccaaatgattgattggatcgatcagacgctttgtctgccattttgccagcagataagctcccgccaccatcaaaagaaagatcccaatgatgtatggaagaagcttccgaattgttggaagcacattatcaatagtctgggaggcacgaagaaccgtcccatcctgcagtcggatcgcataatagaacgtcttttgtccaagtgtatcggacgttcttactgcttctcctctcccgttttccatcgctcctttgatttcttttcggtttttatgattttctaacgtcgtatcgtcttgtacagagtcatagagtactgtaccatcctgcccgactagtgtaagcctggtgcttttttgcacattgtccatgacattcagatattcttctccagcaatatcgactgccgcctgaatatattccgcctcctgcctgagttctgcggttttattcataactgtctgctgataaactgccgcaacggtcaggattcccgagatcaaaagtgcaagaaacgcaactagacacatgcttctttgtatcttacgtctcatcctgtcctcccatccggtagcctactccacgcacagtctcaatcaaatctcctgcactttttaacttctgtctaagtgtacggatatgaacatcgatcgtccttgtctccccatcgaaatcatatccccatacttcctccaaaagtctgtctcttgacaatacaatatttttatttcggatcagaagctccaaaagttcaaattccttcaacgtcaatgtgacagggattccatccactctcacttcatgttttttctgatccagcataagatttctgatctcatactgtgtgcttttctcttcccgcttcgtccttcttaacaccgctttcacgcgcgagatcagctccatcattccaaacggcttcgtcacatagtcatctgcgccgctgtccaacccgatcactttgtcatactctgccccttttgctgtaaccatgatcaccgggatatccttcgtctttgctgaacttttgagcttcttcaaaagggaaataccgtcctctcccggaagcatgatatcaagcagaacaagctctggcgtctcaaatgccaaagctttcataaatgcagtcccatctggaaatccacaggctttcatccctgtggactccagtgtatatacgaccaattcccggatgttactgtcgtcttccacgcaataaatcatcttcgttctctcctttatctatctctccacaagctgtccgtctttgtgcacgcctgtgatagagaattctacccattctgcaatatttgttgcatggtctccaatacgctcgagatacttcgtgatcataatcaaatcaatcgctttctcgccctgctttccgccatccttcagaatcaattctaccagtttcgcctttacaagttcaaacattctgtccacttcgtcatcggcaagcatgaccttttgcgccatctccaaatctttattgacataggcaaggatactgtcatgaaccatcttgctcgttgcttctgccatcgtcccgattaccgaaatatctctcgcttctgacattccagcagaaatgataatctccgcgatatctgatgtctgatctccgatccgctccatatctgtgatcattttcagcgccgcagaaatctggcgcagatctcttgccaccggctgctgctgaagcagaagttttaagcacagtctctcgatatctttctcaatctgatcaatctcttcatcttcgctcatgacgagctttgcaagttccaaatctccgtttctcagagcctttgtcgcatttgcaattgctttctcacaaaggcttcccataaaaataagctgttcactgagtcgttccagctgcatatcaaacttattgcgcatctcttatccaaacctccctgtaatataatcttccgttctcttatctgatggaatcgagaacaatttttctgtattgttatattcaatcatctcaccaagaaggaaaaacgcggtattgtccgacacgcgcactgcctgttgcatattgtgtgtaaccatgacaatagtatagtctttttttagttccatggcaaggtcttcaatcttcgatgttgagattggatccaatgcagatgtcggctcatccatcaaaagcacttctggctgtactgcaagcgctcttgcaatacaaagtctctgctgctgtccgccggacattccaagtgcacttttcttcaaacggtcctttgtttcctcccaaattgctgcctggcgaagcgatttttccacaatatcatctaactttgccttagaatggatcccatgtgtacgcggtccaaatgcaatgttgtcataaatactcattggaaatggatttggcttttgaaataccattccgacacgttttctgagaagattcacatccatccttccataaatgtcctcttgatccagtaaaatctgtccgtcgatccgacatccttccacaagatcattcatccggttgatcgactttaacaaagtagattttccacatccgctcggcccaataaatgcagtgatcttgtttgcctcgatttccatattaatatttttcagcgccttaaaatcgccataatataaatctaggttctttacactaattttccccatttccatttcctttcgtaatctttttcgcaatatatccggacaggcagttgattccgacaacaagtacaagaagtacgaccgccgtcgcataagcctgatccatgtaaagtccttcactggacagattgtacatatgtacggcaagggttcgcccagatcccatcacacttttcggcactgccggaacagttcccgctgtatagatcagcgctgccgtttccccaacaattcttccgaccgccagaattacacctgcaagaattcccggtactgccgatggcagaactacacaaaaaaccgtccggagttttcccgctcctaacccaaagcttccctcacggaaactatctggaactgattttaatgcttcctctgttgttcggatgatcagtggaagaatcatgattgccaatgtaaatgcccccgcaagtagagaatatccccagccgagtgttgttacgaaaaacaacaatccgaataatccgtaaacaatcgacgggattcccgacaacgtttccgtcgtaagtcggatgatttccacaaatttatttcctctctttgcatattctacaagaaagattgcggcaaaaatcccaagcggtactgcaattacaagcgataacgcagtcattccgattgtatttaacagcgccggcatcaaagatgcattttctgaagtatattttaatgcaaacagatctggtgtcagatgcggaagtcctttgatcaaaatgtatgcaatcaaaaataagagaactgcaaaagttgccactgctgacaacatcacaaggagcatcaagattaacgatccaggtcttcgtctgtaagcacgaagtttttgtccaattgtctgcctattcatgttgtgccctcctgttcaacaatgatacggaaagattgatcagcaggataaagacaaataaaacaacggcagttgcaatcagtgcctctctgtgaagtcctgctgcatatcccatctccagcacaatatttgccgtaagagtacgaacacctctcacaatccccgcaggcattctcgcctggtttcctgctaccatgatcactgccatcgtctctccgatcgcacgtccgatccccagtacaattcctgctacaacacctgattttgctgccgggagaacaaccgaaaagatacttcgctcatgtgtcgcccccagtgcaagtgcaccctcataataatgcgccggcacagaacggatcgctgactctgtgacaccgatgatcgtcggaagaatcatcattccaagtaagatagatgcagtcagaatgctgcttccatttccaccccagtgaaatttctggcagatgtctctgatcaatggcacaagtactaccaatccaaaaaatccatatacaacggacgggattcctgccaaaagttcggtagcacctttcagcaccggatagattttctttggacaatattttgccataaataccgatgtcagaattccgatcggaactcctaaaataattgctcccgcagtgacatagatacttcccatgatcatcgggaggattccgaagatttcattggtcggcttccacctctctccggtcaaaaattccataaatccaatttccttcattgcaggaattccatttgcgaataaaaatacacaaatgagagccaccgccagcaccgaagtacaggcggcgatgaaaaacactccctgcatgaacttttctttccatgctttcatattgttttttccctcttatccatctttctcaggctgttttgcaagcaattcctgaattagtttaactcatcccaagcaagcacttcacctgtatagatttcttttatctgatcacttgtgagctcatccatcggatttgctttatttacgattactgcaattccatctgttgcgatcacagttgcttttaactgctctttctcttcatccttcaactctctggacgccattccaatatcacagattccatcgattgcagaagtcatacctgttgtggaatcacttgtctgaatctcaatctctgcacttgtgttcacttttaaataagcttcttttaacttctccatcaccggtgaaatagaagaagatcctgcgacaacaatctttccttctggcttgctgcccgcatatggcttcacatcatcaagagaaatatatccattatcagatacgatttcctgtccctcttcactcagaatgtaatcgatgaaatcttgtgtcacttcgcttacttcttcctttgtagcaatgttaaatggtcttgccactttgtaggaaccatctttgatattgtcttctgtcgcttccgctccatctactttcacagcttttacactgtcatcaagagatcccagagaaatataaccgatagcatactcattgcctgctactgttgacatcataacagatgtactgtttgtaatatttgcctcttctgttgtattatctattttatttccttcatcgtccttctcttcaattcccagcagctcgatgaatgctcctcttgttcctgaaccatcttctcttgatgtcacagaaatatcatttgcagagtcaaatgaagtatccgtttctccacttgcttccgttttttcattcgtttctgtttttccttcttcttcactgcttccgcaacctgctgccattgctgctgtcatagataccactgccattactgctaaaaactttttcattttcatacgatttactctccttcaatccgtcttatttttcattctgctttcgtttacaagtgatactatacttggcgattgttaaatttaaaaacagccttttgttaaatctgtgtaaaattattttacaaaaaaagaagcatgtctttttacggacacgctcctctcatcatatcaaaacatattcttttttgattaagaaagtctcttttcaaagtttccgactgccttcacaccttctgtaaagatcataaatgcattcggatcgatctctgagacaattcttgtgatctcattctgttcgtatttcgaaatcataacaacaaatactttggaatcttccttcgtgtaggaaccttttccttcccactccgtcacaccgcggcgcatctcattcataatcgcctgctcaaccccatccttctttgtaaagatcatcacactgagactaatgttctgcacatgcacccggtcacacgtcattgccatcacggtcgcatagatcaacgagtaaactgtaatttctatatcaaatatcataaaacagattccatacacgaaaatattcataagaatacttacttttccaacactgaatgacgggtatttcttcgcacataccattcctagtgtatcctggcctcctccggagcttccccctctcaggatcattcctgttccgacaccagcaacaagccctccgataatacacgccgtcagatagtcttcaatgatcggtgtattgggaatcggaataaatgtcataaacaacgtctcaattgttgtcgtgtagacagacaaccagaaaaatccccttccaagtactttccatgccatgaaaaacaacggtacatttaataaccagaaaataataccgtcaagattgatcccgctaagcgcggcaatcttcagatagtctacaagaaatgtacggatcaactgagcaatacctaagaaagttccattatataaatgcagcggtaaaataataatattaacgcccgcagcaaacagaagacttccaaatgttgcccagagaagacgtacagccattttcttgttcttcaatttctccattccttttttcctcctaacgtactcttagagcgtgccgggaagtgctctgacgaactcctctctgacacgctctaagttattttatcatttccaggaacgattgccaactcctatttgctattcttttcagattctattacgattccttctcccgctccgattcctgcaggcacgctttgattgcttcattgagcgataacatcttctcatcaagcgccgagaccatatccgcacattctcttaagtctctgctgatatattccggtgcgttcccttcaaatttgtaataaatcttatgctcaagacttgcccaaaaatccatcgcaattgtacggatctgaatctcaaccttcgtatcgacaacactgtccgataaaaaaatcggtacagaaacaagcatatgataactcttatatccgctctccttcggattcttgatatagtccttgatcgacagcactttcaaatcgctttgattcccgatcatacctgccagccgataaatatctgatgtaaaagagcagatcagtctgacccccgcaatgtcattgacatacttaaccatattttcaatggatgtctcatgtccatagcgcttcaacttctttacaatactctccggtgacttgattctagatttaatatgctcaattggattatacttgtgtacatgctgaaactcatcatttaatatttccagtttcgttcctacttctttcattgcggcattgtacaaaaacatgacagtcttccaactatccacatcctcgtaattttttaccactgttctcatcacgttccttctctccttgtatccgaaaaatcatttgatacaattattataacataggataatttaattgtcttaaatttcacaattttttaatattctttatactttttcatatgttgtcccattttctccatggaagaaagataagcacaccctgtccttttctttactcctcaataatatgaatttccagatagtcaaagtcgatggaatccacaaaattatcctgataaaatcttgccttgtcatgtctctgaaattcactgattgtatgattcagccaaattggtttactcagatcaaattcgtaacaaatttcatctaacgcacggaaaattttatgtgtcctcgtatcttcctcctcaatacagatgaccgtatcgcgtaccatccggttgtctttaaatatctttccccataatcgaaacatctctttcatctcctgccatcaaaaactgttatagtatctggatctgacacatctgcatcgtagacagcgccgcctcgtggctctctggagttactcctgcacagcagcttcgatccacaacaatgtctgtctctggaagacgtgcttttagaagaagtgcatttgacacaacacaaatatctgtgcagagaccgacaagctcaatggattcatatccttgctcggcaacataatcagccagagcaatgcttccaaaagtttccttgtcaaaaattctgtcagcataagacttcaggcagtctatgatctcccagccttctgtttctttgacacagtggataaccggaagcgacttcccctcttttgtctgaaggtaatcctctccgtgggtatctcttgtgaaaataagttctgtccccatttcccgggcagcttttactttcttctccactgcttctacaatttcccgtgcctcctttgttccaagacttccatctacaaaatcattttgcatatccacaacgatcagtgcctttttcatattcattcctcatttcaattttttatttttctcagccatttttcttcccttttattttgagataaaccgctgaaaaatacaagccttttctaatggaaacaacaaattttgtgcacacctaaaaacagagaggctttttacacctctcttccagtttttctattcgttacggattgccgcaagcggacttaacctcatagcacgcagcgccgggaaatatcctgctgccatcccgaccaaaattgcaaatccaagggaagccagaataagccaaattggaatatatgaaatgtctccttcaaatcccatcgcacttcccatgcttctggcaattgtattgattccaaatgacagaagcatactcaaaatatttccaatcacacctcccaaaagtccgatgaaacctgcctcgatcagaaacatctgtttgatatttttcagactgcacccaagtactttgatgacaccgatctccttagtcctctcatagatggacatcatcatcgtattggcaattccaattgctgctacaagaagtgatactgcaccaattcctccaagtacagcctgaatgatcgcaaactgactctgcatgctttttaaatattctgcattgctgttcgcggtatatcccatttctcgaattttggctgacacttcctctacatagtcaatatcatctacctgcacacaggcggacgaatatacaaattccttatatggctttccagactttgtcgtcggctgcccgggaatcggtttcgttccatactcttttttcagagaagcaatcagcgtatccagatcacaatatacataataagaatgtgaattataggtgtttaagtctcccttcaccatcccactggcatggacaacatatttttttggcgcttttgcgctcgcctggtttcctccctgcccttcattcttgccaagtgactgctccaaagaacttgttccattctgtttggaagccaaatatgcatccgaatctaagattaagaacaaagaatccttcatgtaatcgatttctggcagttttccggtttcccaatatccttttcctgtatttttttcataaagcatctcaggaatcaaattaccgatgatcagctccaaattggatgtctttgtctctggaagacgactcccctctatcagtggaatattttgctcctccaatgcttccggacgcattcctctcaaatcaatgtatccctcataatttcctttgagaatcatcgctgacattgacaacaccggagacgccattttcacatgttctatcttgctcaactcttcgatggcctcatctgtaatgtatttttccgactcctgatcctgatgcatcatatcactgctgatgatgacaccgcctcccccattattcttcccagtgacatcaatatttgtaatcccaccagattcctccacttgcttatacatggatttctgcatgccaagtccgagtgaaatcatcacgacaatggaagctgtaccgatcaccacaccgagaacagtcagaaaagtcctgagttttctgcgctttaaatttccactactcatcctcagtaagtctatcaaactcatctgccaagctctcctcctcttcttgaagctttctttgttttttcttctttacgatgataatcgcagcaatccctcccgcaagtattactactgcaatcccaactggcagaatcggaaaacctttcttttcctgctctgtttcagggctaaataccattcctgcatcttcctgttttggagtcacaagaagctggaattcctgttctgtcgagtatggggctcctgcctcatcttcataagtcacgatcatcttcattcttccatctccggtcgtctctttctccccagttaccattccatcaatagccgcagaagatcccgattccacatgacctacaaatacttcttttcctttgattccttccccctcaaatttcgcctttacattataaagtttggtacgtccaagattatagatattgcacataatattcgcttcatcaccgactgcgatttccggcgagctgacttccacctcactgaactcaaatctcgccgcctgcttgatcggaattgcaagcgccgcatgtccctcatactgtgttgcattgccatcctgatatttcatggacaattcaatactgtatggcttttgaagcaaatctgcccgtgcattcagagcaatcgcaatatctttcgtccctcctgccggaatatgatccaaatagacagagctggatccggaaaccggaagaaatgccggggctgctccgcttgactccgcgccttccgccggagcattgaattcaaagagcatattggaaacagccgtatcctgagaggtattctgtaaatgtacaatcagattaaagttacttcccgcaggaatctctgccggatctgtattaaatccggacacgataacacgtggcactcctgtctttgtctcacctccgccagatacaacctctcctccattatatactccacctgcatcgtacggataagaaacagagccattttgttccccacttccctggtcttgctggtcaggattttgctgccctggatcttgctgattctggttttcctctttgacatccgttttcaaaaaaacactttgttccgaaatcgtaccttccgcacatgtcagatcaaatttcaatttgtagtagcgagatactacatcctgccgtgcagtaaatgcataagatactgcctttgtctctccaggtgcgattgcatccactgtctgtgtataatttttgttttcaatctcaaacggccacgcgtctgtatttgcttttactctcggagtcacgttgacacaagtcaacggtgtatttcctgtgtttgtgaaatttaataataaattttttgtctcccccgcccggtagagaaggacatcgctttcatttccttcaatctgggatgtcatctccagaccaatctgcgtttgtccctcttccgttgtcatcatttccttttctgtattcagttcctttgcatacacttccgcaggcaacaccattgctgcacagagaaggaatgctgcccatctctttttgcttctcattgctttctttcctttccactctcttctgatttttctttcccttgttcccgattatcaacgatctttacaatctccccgtcaataatatggaacactctgtctgcatactctgcaagatgattgtcatgcgtgaccattactagtgtcttcttctgctccttaactactttctgcatcaaacgcatcacctcttctgacgtatgcgaatccaaatttcctgtcggttcatctgcaaaaataatcttcggatccactacaagagctctcgctactccgactcgctgctgctgtccgcccgacatttgattcggcagatgctttttatgctttttcaaattgacaagatcaagcatctcattggcaatcttcatccgcttactttttggcatccctcggaagctcagcggcaatgccacattttctactgcattcatcgtcccgatcaaatggaaagactgaaatataaaacctacgttctccctgcggaattttacaagtccatcttcatttaacttttccatatgaacgccattgataatcacctcacccttggttggtttttcaagtcctgcaagcatatttaacagtgttgactttcccgaaccggaagtcccgacgattgcacaaaactctccttcatagatactaaaattcacgccatttaatgcacgcacgatactgtctcctacacggtacaacttaaacaagtgtttcgcctcaatgatcttcttcacttcactgctcctttctctgcatcggtcaaatccatgcgttttttctttcacttccacaccacatgaccagacatccatgcactcccatatgctaataatactctcaattctgtaaaaaagaaaaaacattacactcacttgaaattatgataccatatcatacaatattttttatttataaatatttaataatttcttaatttcatatcacgattttagtgggttttcaggcacctttgttactaacgtgttactaacgcgtttaatatcttcctgtttcaaaaaagagagcctgtttccaagctctcttgataatattttttcaattttcattgccccactttttatgctcttcccagtcttttttattgagtataatttcagaataatagaactccttattcggtatgatttttgtagtattttaatttattgctcatatcttattataccacagattacggactcttcggatttcgttttctgattttgtatattaaaaacggagtcactgccccatagtgattcctcatctattttgcagcaactcctattttcattttatatttagttttccggattcataatttcttctgcaatatttcttgcatgatctgaaattctctccatagaaacgagcgtatccaaatagaagatacccgtctctgcattacactgattatttgcaagacgtttgatatgtttatttctcaaacgtacctccagatcatctgcaagtgtttctttctcaatcaccttcactgctttctctgaattcttctcaaagaatgcctcctttgcgtaaagataactttccacacagacatccatcatctgtttgatctcttctgtcgcaatttctgagaattctaacttcttatcgcgcatcgcctctgcatactctgaaatgttctcacagtagtcacagatccgttccatatctgatacgacttggagtaagtgtgccacatcttgatgttccttctcgctgacctgaagtgctgtgatcttaatagcataatctgtaattcctgcactaagcttatctacaacagactctttctccttgatacttttgatcgtctcttcactctttgtaaagagtacttccttagattctttcaatgtctctgcaacaatatttcccattcttacaatctctgtcacggtagactgtaatgcaatacctggtgtctgaagcattctgtcatccagtaatacaacgtcgtcttcctgtgtacactcttctacacggccaagtttctttgccaatgtgataatccagttggataccgggaaaagcaataccgttgttccgatattaaagattgtatgaacagtactgatctctgtctgggtgatcaaattttctcccagagccggattcataactgtaaagaatataattgccacaatactgaaaatcacagtaccgattacattgaacagcaaatgcatcaatgctgctgtctttgcatttctctttgctccaacactggaaagcatcgctgtcacacatgtaccgatgttctgtcccataatgatataaactgctgcactcatcggaacaagtcctgctgctgcaagactctgaaggattccgacagatgcagaagaactctggatcacagctgtcacaattgttcctgcaagaattccaaggaatggattctttccaagtgtcacaaaaatattacaaaatgcttctgattctttcagtggagaaactgctcctgacattgtagaaataccgacaaataaaataccaaatccaacaatgatacttgaaatatcctttgtggaacgtctctttcctgtcagcatgatcaccacaccgataataattgcgattggtgccaaattcgccgggcttaacatctttgcccattccacactcgatacaagccatcctgtgacagttgtaccaatgttggctcccataataactcccattgcctgtgtcaggttcatgattcccgcatttacaaaaccaacaaccataacagttgtagctgatgaactctgaatcacagccgtaataaatgctccaagcaataccccaaaaaacttgttcttcgtcaaaacttcgagcaaagatttcatcttattgccagcagcattttccagtccctgtgccataatctgcataccgtagatgaacattccaagcccacctacaaacggaataataatgccagtgtaatccataggcttcctcctcataactaatacattttaaattcacctttttaccataacattatattcgacagaaaacaacatctttttactatttttctactttttcattttcggctcaaacacaagcgaaccaaggtatccaaatacaagtgccgccgaaattcctgcagcgctcgctgtaaatcctccggtaaaaatgccgatcagaccatcctttcggactgcctctttgactcctttccataacagatttccaaatccgagcagcggaacacttgctcccgcttttgcaaaagaaacaattggctgataaatatttaaaaatccaagtaccgcgccagagcacacgagcaataccatcactctccccggcatcaattttgtccgatcaagtaaaatctgcacaagtgcacagatcaatcctcccaccaaaaatgctttgacataatccacaatgtttcctctctttctcacacattcctaattcatcaacaatgttccagcacgatgccatgtgcaatgcccgggacactttccccttcattgaagctgactgttgacatgagtgctcctgtcggtacaaacaacacacgtctccattctccgctctcaatctttggaagaatatatgctgccagtgtcaccgccgcacatccgcatccgcttcctcctgcatgcgtgtcctgcctttgctgatcaaagattgtcattccacaatccatatgattctgcttgatatcctttcctttttttctcacaagatcaaacaaaatcgtctgccccacatacccaagatctccggtaatgatccgatcataatcgctttcctgtctcccaaaatcttttagattctgcaaaatcgtatcacacgccgccggagccatacatgctcccatattttgcgaatccttaagcccatagtcaacaatctttccaacggttactcctgacactctcacatgactccgtttctttcctattaaaaaggcgccgctccctgttacagtccaatgggcagacagcggcctctgactggcatatgccagcggaaatcggaattctttctctgcacttccaaagtggctcgatgtcaccgcaagcatgtattctccataccccgccgccactgccatagatccaagtgcaagtgcttcccctgaagtagagcaagccccataaagtccaaacataggaatctgaagtgcctccactcccatggaagttgcaattccctgccgcagcaagtctcctccgtataaatatcgaacctctttggcatcaattcctgctttttccaatgccagaacgcacgcttccttctgcattctgctctccgctgcttcccatgtctgttccccaaacaggttgtcctcccccgccatatcaaacaggtttccaagcggtccttcaaattcttttttccctacaatcgacccggcgctgatcacatatggcgcctcctgaaaacagatactctgacttcctcttaccattgtcatacaatcaccccgactttcaataacagatagtaaatcagccccaatccccaggatgtcacaatcccatataaaataaccgggcctgcaatcgtaaatattttacatccgattccaaatatctgtccttcttttttatattcgattgccggagccgccacggaattggcaaatccggtgatcggtacgagcgcccctgcgcctccccattttgcaatccccggatacaaattccatccggtgagaagtacactgagcaaaactaacatgagtgatgtccatgttccgctgatttcttctgtacatcctgcatttttacagaaattcataaaaaactgcccgatcacacagatggttccgcctgtcacaaatgcttttgccatattcagatagacgttgtgcactggtgtctttgttttgacataatcctgatatgccttttccttcctttttttcttttcttgttcgtccatgtccttccctttcttttcgttttattctgaatctatctgtttgttttctttctttttctgatctgttatccccagcctttccagaaataaatcagcgaaccaattccttttccaaatgctatccccgcaataatataaggaattgcccggagaagcttcactcgtctgataaaaattgggaaaatattcaaaatttctgccaaggtcattgcccagcaccctacaaaaatccccccaaataccccgaaaatcggaacaaatatctgcccataaggaattgtgaccggaaataaatagaacagatttccaaagattcctccaagtgcgatggattcttcgtaaagaagcacgcaatctcctgtatgtgtacggtctgcaaattcagataccactccgagacctacgataaatgaaaacaatcctcctgccgccgcaactcctgcgctaagtccaagtaccacaagtatcatctgtttgatccacatgacgtttctctctttcttttttgttccctcatagcttttcctacttacttaacatcaatttcttttttctttctctcataattttgtaccaatgttgtctgaatatcattctcataaagcctcatttccacctccatcggtgttggatcgaccgagaatcttttaccggcaaaatgattgaaaaacacaagaatgccaataatcagaccaatgctgtaacagacttccaacagtgtaaatccacttgacggtacccccgtgagctgctcataaacctgcccaaacattttccccacatccacatcattgttaaatgccataattgaaaaggctgagcctagaaatgtaatcatcacaactcccaccgtcttcagaaaatgtaccgcctttcccggagtcttttgcttttcataagtaacaataaattctgtctcaccaagattttcaatatccaatcccggatataccctgtgaatctgctcaataacctttaaaatagaaaatacaaaccggttctgtccctgttccggcattttcagaagtcgttccgtcttcaatcttgtcacaatggtttggtccgtacactccatcgaaagaacatctcccagcgtcacttcctgttttgtcaattcaatactgcggtctgcctttatatataattttctgtttgttgctgccatgtgctgcccatctccgatctttccattcttacaagcgttccttccccagataattctgtctctcgcacatccgtaacataatagcaaagcccgacaactatcgccaccgcaacagcgcagagcagacagatccagattttctttcttgcattgtccatttttgcaccacctttctgatacttctctgcctcacagagttgctgcttacctgttctgccagagattgcttattcctattatttccgcatttggcaaacctatactcttcaggaaaacttaatgaaaagaggaagctgctctcgttgtgagctgctccctcctcaaatttcttattttttctcccggcataccaatcgcccagactcatcctgtctgtatttttgtcctcatattttttagaatcttcttttcaagccttgatacctgcacttgggaaatcccgagtttttttccaatctctgactgtgtttgatttgcaaagtaccgcaaatagatcaactgtcgttcctctctatcaagctcctcgagaagctgacgtatcagcatatgattcagtatcgtttcttcctgcccttcctcttcctccagcttatcaagaagctgaatctcatttccatccttctgataaatcggtttgtgcagcgattccacttccccgctcgcatcaagcgccatcgcaagttcttccttctccacctccagctccgctgccagttcttccattgtcggctcccggttatattttttctgaagacgctcccttgccaaaaatgctttgtatgcagtctcctttaatgaccggctcactttaatcatcccatcatctcttaggaatctccgaatctcccctgaaatcataggcactgcataagtcgaaaatttcacatcataattcagatcaaatttatcaattgctttcaaaagtccgatacttccaatctgaaacaaatcttcactgtccgttccccttccaaagaaccgcttcacaatacaccatacaagccctgtattttcctccactaattgttctctcgctttctcatctccatcgtgtgatctttgaattaaagcgattgtgtggtccatagctccctgcctttcccgatagtctttttcattcggaccaacgtcccctttcccagttcggattctacatacacattgtccataaaggcttccataaatgcaaatcccattcctgaccggtcaagttctggtcttgtcgtaaataacggttccattgccttttcgacattttcaattccttttccttcatctctaatttctacatagagtgtctgcccttcaatccagcatcgaatcataattttcttcacttttccatcatacccatggatcagcgcattcgtgactgcctctgagaccgcagtctttacatctgatacttcctccaaagtcggattgagctgtgtcataaatgctgcaacagacacacgcgcaaatccttcattgaccggtctgctgtcaaataccagttccatttcatttgtgttcttcatcattgtttttcctcctcaaacatctggattattttcgtcacacctgacatttttaatatttttctgatccgctcatttgcgtttactgcccagacttcgccaccaactaaatagaccagcttatatcttcccataaggactccaattcccgaactatccataaaattcgtgtttgcaaagtcaaaaataacatatttgatatggttatgctcaatcagcatatctgccctctttctcacttgctccgcattgcagtggtctaactctgcgggaagaaaaattgtaagactgttttcttcaatctgatactccatataaccctcctgttttcgtagtctataaatcgaaaaaaaaggacatacacgctctttgtgtatctccttttctttcgtacttctatttctattgatattcctcgtaagttacatctccataggattcttctgttccctgataattgtcatatacatcctgatccccttgtccttggtaatcttctgtatcacttccggcagtatccccataagcactgccataatcattatacacatccgctcctgactgtccggaatccacactctcttccgtaccagccccctgagtatttgccggggttcctttttgtgcctcttctgctctctttgcaacatctgttttcggatatgcctcgatgatctgcttgtatattgcctcagccttatctttctcattgttcaacagataagagtctccaagtaacagcagtgcctctccatctttgtaatgcccatccatccggatcagttcctccaaaagtgtgatcgcttttggataatctccctgctgatagctttgctttgcactactgtaatgttctgcacagatgctcggatacacttcatcggcaatcgcctgatactgaacttttccctgatctccaagggaatctttctgcacttccaaaagttcttttgcaagtgtggcgtaagcatactgcccggagttatagtgctccttgaccgtcaaaagcttctcatagctgtcttttgccgccagtgcagcagccgttgccgcctcgttctcatcggaagaatttctaatggtctctaattcctttttcatcgcgctgatctgcgcatctttggaattgatctcctctttaaatgccagcaccgatttgttgcttcgattggattttacttcattcaccgccggaacaatgagaaaccatacaacggctgctcctagtaaaattcctatgacaatattcaaaatggtaaggaatcctgcattctctttcagtggagagaccgccggctgaatgaccgtgtcattcccaatctcataggtcttctgttctcttcctttcgtgccttgcgtttctctgagttcggacaactcgtgcatatatttcaaggttgtctcatttgtcgtgtcgagacgatgtgcccgcttcaacacctgttttgctttctggtactgacctgtttttaaatacaatagcgccaaaagctgatatgctttcagataagacggatgtatctgcaccgccttcttcagttgaatcaccgccagatcttccgcaccctgatcacagtaaacgaggcactgattatacatctgcactgctctgtcaatttcttctaatgtttttttatctttctggatttctctgataaagtatcccgccagattgtctgatttttgaaaattttgactgaggatccactctacgattgcctccgcaatctctcctctttcataataaacaagccccagaaggttccttgcagggatgttctccctgttatactgaaggctccgctttaatgactgaacggcgcccgatatgtcccttatttttgcttttctcagtccatcattataccagtaatttgactgatgtaatattttctccgtatactccatgcaattccaccgtaatctttctgctatttcgcctgactgagcatctcccgcagaatatcagtcatatcagacaagtcttcctgatacactgcctcctctatgtcatctacttccaggctaggtttaaatttctttaattcctcttcataatctaacattctggttctcccttcacaagctctttgatcatacctacaaggtagagtgagcccaggcagtaggcaataccgtcttctcctttttgtttcatcatctccgcccatgcctcttctaattgttcccggacagtcacttcactgtctgtatatttccgaacgatccgggcaagttcacccgcatcgacttttcgtgtactttccacggtcgtgatcacataactgtccactgataaattctggcatagttctgcgatcatcttctcgtactctttctctttgactgctgaaaacagaatcacagtccgtccaccgtgaacaggtcttcgcttcaccgtctcgacaaaccgctctactgcattctcgttatgtgctccgtctatgtagactcccgggaggatttcctccattcttcccggccatttcacatgaaacagcgtatccttccatagtttcagatgtctttttggaagaagtagctgcacagcctctagtgcaagcagtgcattgtccacctgataacatccggtattggaaagcctccatgtagtatcttcatcatacgcacttcgttttgaaaatgcaatatatttctctgtgatttcctgaatttcgtacgcatctttcgtgatttctctacaaggtgcaccacaattttccgcaatttgtcggaaaacagctgctgcctgcacattattcccatcgaatacaagcggaacctgtcttttgatgatcccgcccttttctgctgcaattttttctatcgtatctcccagtatctccatatgatccattccgactgctgtgatcacagtcaataccggatcatcgattgcattcgtggcatccagcctgccaccgagccctgtctccagcacaatgtactccatgtctgccatcgcaaaagcagtcatcgccattccaaacaaaaattcaaaaaaagtcggatgtgccagcccgtctttttccatctcatccacagtagtttttactttctgaaaaacagcaagaaatgtttcatcgtctatctcttccccatttattctgatccgctcattgatcttcacaagatggggagaactgaaaaatcctgtcctctttttctccgcaagcaaaagagcctgtatgtatgcacatacagagccctttccatttgtccctgccacatgaattactttcctaccgacctgtggatttccaagtcttaataggaactcttttgtatgtgtcagatgattcttcactgtgaattttggaatgtctaaaatatatttcacactttcctgataattcacttgtcttctccattatttctgcggtgtttcagacgaatcgtctgccgcatcttttgtttcttctgtcactgtctttacatcttctgcctttttttcttcctcttccagctgaagcttcaattcttctgtcaactcttctatcttgccaccgcggtaaatgtattccgcagaagtacgaaagaccgtattacttgatcccatctgaatgatcgtgataatatctccttccttcagctctgtctcctgcagttcgatcctcgtattattcaaaaatttagagctcttcttctcgccattgacatagactctactatttttagtaaaattctcgccatagaggctatatgttccgtcaagctgtgtgatcagatctgtcagcacgacatccttaattcccatctgcatgtgtccttccggcactggatttttccctccgtacacatacttctctccatagagaatatcatactgcagcatctccagatcgagtaagtagttcttcgtctgccttctcttctggtgataattgaatatcgttccggaatggatatccaacttctcaaaaacatccgccatgatctgataagatgcaatatttcgatcctgtttttccaatccgatattatcccatacaacatagtttgtattgtacagataccttcccttcagatcttcggatttcagtccaagtgttggcagatgatctccatataggactagaacggttggttcctttctatcttccaacgcctgcacaagatctccgataaactgatcgacttcatagatttgattgacataatattcccatgcacttcttacttcttcatcctctattccggtcacttgaatccttggattttctaaatgctgtccatagtaatcgccatgactttgtactgtgatcccaaatacgaaatcctgctgttctgtcgaatccattgcgttcatgatatgttctgtgaggatatcatccttcgcccacccattctcggtaagctgaagaatattcataaattccttactcgtgtaactgtcaaacccgatattattaaataccgttgaacggctgtaaaaatttcctccgttgttgtgaagcgcatgtgcaccgtaaccaaatcgtttcagcgcagttgctgcactctctgcggtttccttttttaatattgtcttatacggatactcccctggtccaaaatatcgcaagttcattccggtcagaacttcaaactctgtgttggccgttccggctcccaccgatggcactttgaaataccctgacgaatatttctcagaaagcgctctgaacgttggaagtggatcctgtgatgtctgcaaaaattctacctcacttgtatcaaagaacgattccagctggataaagagaatatttggcatctcttttcttccggtcttggcctctgtgatcgcaccgttctcactgatctgagcgatcatttcctcactgtagccattcggctgtgaaattccggtattaaacacactcgacataaagcagtatggaaatccataatcttcataggcaaaagcaatatttccaaaataattggaaatcactcgcttatcaagtgctacatctgtcacgacaaaaaataagccaaaccagaataccactccggtcagcgcaagcactcttctcatttttccagcatactgtccgccacgcttccacatggaaatgacccatacaacaaccgctgccacaccaacgatcaccgcaacaagttcaattccgttaaaataagaattgatcaaggtcaccgcatcaccggcaacttttaagtcctgtgcgttaaacggagtgacacgcttcataagcatgtatccgttcgtcaccccaagaccgatccagaatacacttaaaagaattctggcaaaaatacgtcttcttacgagataaacaacagaaaacgtaataaagatcaaaaatgaattatataagaacacttttggtgtctcaaccatataattccacccctgtacaagcgaatgtcgggaaatacattcaatgaccaggttcaaaaagcatgccaaaagtgcatgaaatacaagcgaaaactgattcatgaacttataacacggtgccagctttttcgccagcgggctgttgcgtctcttctctaaaatctgttcccttctctcttttctcttcttccaatacttcttaatgtcttccggctttaaatttttcaccctttgtatgccaccctttatatcggggcgtttgatatgaatccgtttcattgtcacctctcacaatctgatgtgtttattttctaagtccttttaatcgttcctgtacttgttccatcatctgtgtatatttctcaagctttgctctttcttcattgatttttgcttccggagccttgctgataaatttctcattgttcagcatgccattgacacgggcaagttcttttgtcaagcgtgcttcctcttttgtcagacgctctaactcctgctcaaagtcaacaagctcttccattggcagatatacaactgcatctgccacaacgacagaaactgcatcctctgcaattccgctcttgtcggactgaatctggatttcatttgcactcatcagcggcatggaagactctttaatctcctcaaatccctgacaaagattttcattttcacagacaatatatgtcttcgccttacggcttggagcaacattcatctctgcccgtacgttgcggacaccgcggatgatctctttcatgtgatctacaatattctccgcttccggatagcagctgctctctttgtattccggccaggaagacatcatcaatgattcttcttccggaacaagcgcaccgtagatttcttctgtcacaaacggcataaacggatggagcagttttaatgcatcgccgagcacagtctttaatgtataaagtgcgctgtttgctgctgccggattttcctccgcgtgataaatacggtattttgcaagctcgatgtaccagtcacagaactcatcccagataaagtcatatactttttgtacagcgattccaagttcaaatttgtccatgttctctgtcacatctttcgtcagtgtattcatctttgagatgatccattgatccaccgctgacaaatcactttcgttcggaactgtaatctcttttccttccatattcataaggataaagcgggatgcattccatactttgttcgcaaagtttctatttgcctctactctttcatcgtagaaacgcatatcatttccaggtgcatttcccgtcacaagtgtgatacggagcgcatctgcaccatacttctcgataatctccagcggatcaattccgtttccaagagacttactcatctttcttccctgagagtcacggatcaatccatggaataataccgtgtggaacggcgcttttccagtataagcatatccggaaaataccatacggatcacccagaagaagatgatgtcatatccggttacaagtacatcggttggatagaagtaatcaagatcttccgtcttctccggccagccaagtgttgagaacggccaaagtgcggaactgaaccatgtatctaaagtatcttcatcctgcacaaaatgagtacagccacaatccgggcatacctccggcatctctcttgccacaacaacttttccacattcctgacagtaataagccgggattctatgtccccaccagatctgtctggatacacaccaatcacggatattggacagccagttcatataagtcttgttcattcgctctggaatcagtttcagatctccgttgctgatcgcctcgatcgccggttttgccagctcttccatacggacaaaccactgttgttttacgagtggctctaccgttgttccacatctttcatgtgttccgacattatgagaatgatcttctactttcacaaggaatccctgctcttccagatcgcttacgattgcttttctcgcctcatagcgctccatccctgcatattttccaccaagctcgttgatcgtagcatcatcgttcatgatgttgatctccggaaggttatgtctctttccgacttcaaagtcattcgggtcgtgtgccggtgtgatcttcaccgctccggttccaaattccttatctacatagtagtctgccacgattggaatctctctgtttactaatggaagtaatacattctttccgacgatatctttgtatctctcatcatctggatgtaccgcgattgctgtatctcctaacattgtctccggacgtgttgtcgcaatctcaagaaaacgatctgttcctacaattggatatttgatatgccagaaatgtcctgcctgctcttcgtgatcaacctctgcatcggaaagcgctgtcttacataccggacaccagttaacgattctggatcctttataaatgtatccttcctcataaagtttgatgaatacttcctcaactgctttggagcatccctcatccatcgtgaagcgttctcgatcccagtcacaggaaacaccgagttttttcaactggccttcaatcgttcctgcatactcatccttccactgccaggtacgctctaaaaatttctctcttccaagttccttcttatcaattccttctgcctttaactgctctgtaacttttacctctgtggcaatcgccgcatgatctgtacccggaatccaaagtgcattgtatccctgcattctcttataacggatcaggatatcctgaagtgtattgtcaaatgcatgccccatatgaagctttcctgtgatattcggcggtggcattacagttgtaaacggttttttacttctgtctacttctgcgtgaaaatatttgttctcacaccatttttcataaagtttcggctcaatctcttttggattgtaagtcttctctaaattcttactcatcatttcctcctttgcaaaccctcttttgctcttcatcttcttttagctctatcatgagtgaccgctctttatcttttcctttgatatgatttcctatggaatagaaaacgccctctacatactgtaaagggcgaatgatcgcggtaccacctttgttatctctctgctccatactccgtaaatctctgtacaaaagcagatcgatatctctagcgtccggtaacggggacgatccgtgactacctactgtcagcattgctgccgcttcagtcgtccggttcaaaagctacttccacaattccttcttgaaatcacctttcagcccatgagtgatcctctcttgcaagggatctttgcgtactcctctttctctcaaccttttcttattcgatattccttatgatagtcggctaactgccatttgtcaagaagttcataaattctttagattttcataagttcttcacaactttattctcatcttcttacaaccgcagcccccggtaacgattcaggcaggcaaagatctcctgctttctcggcattgcaaaattaaccggaagatacgaagactctgcaatggaagcaagtccatcccgctccatcttctgctccatcgcatctactacctgctggattgttttctttccatcaaacagattctgctctgcatacttcacgagatagccaagtacatttgtctgttccgcatcaacaatctgttccacatagcgaagttcgattgtctctcgattcatctggatgccatcttttcccatcgccttgatcttcacttttccgcggtctgcgaatgtcctgtttttttctgcgcttcggagcacggatggtttcttcatctcccgctttccttccgataccggaagcggaaatgccgctgcctcttgctttgcgaaagctgtaatctccgctggctcatactgttccatctggataatcgtatctgcgatatggaaataagatccggaacttcccgctacgatgatcgaggacaccccttctttttcatacaactccctcactcggtcaataaacggtgtgatcggttctttttcccttgccactacccgctgcatcagttcatcgcggatcataaagtttgtggcactcgtatcctcatcgatcagaaacaatctgcttcctgcctcgatcgcctcaactacatttgccgcctgcgaagtacttccacttgcatcttcggtatagaatgcctctgtatttttcttattcgggagattgttgatgaacatagaaatgtctgtctttttgatactccgtccatcttccgccctgagtttgactgcagtatcatcactgatcacatactctcttccatctccagcaatgtgattatacacaccaacttccagcgcatttaacaatgtggatttcccgtgatagccgccgcctacgatcaaagtaattccacatggaatccccataccgttaatctttcctctgtgcggcaactccatctccacttccatctctttcggcgaacggaatggaaccccattcttcatcgggcgggaagaaattccactctctctcggcaaaatcgagccgtttgccacaaatgcactaagatttcgcttcaggatctcttcccggatcacctgctgatcttccgccaaaaaaatcgtctgctcaatttttttctgatctgcacacggatagaaaaatgattcctttacacactctggaagaaactcaaagaaaattttaataagctctccggaattaattgtccttccatttgccggaaatcctacttccatacgcacaagcacgttaccatttgccgggtcaatcgtgcaggctgtccgttccagaatctcctgtccgcatctgctgacagataacaaaccacttttccccgaaccctttgccttgaagttgaagcgttcgatcttctgataaaatactcttgtcagataatcctgcagcgcgatccgcttatatttcttgtcaaataattgtttcggaaaccttgccagttgtccgtcaatcgcaacactcactttcgatggcgatgcaaatggatctccctgcacatgatcgatctgcagaatataatccgcaaaccgataactgcccttcgtccccttatatgcaggataactcttccgatgaatctcatttagtaactttctcaaatcctgtgctgacttcatttccttgcttttacctctttctgtctctttttattttttctttctctgcggtttttccggcgcgattttcccctcagttacactaaggtgtcgtgcagttcttctacgctctctttgatcattgccgctcccgcttcttccagctcttgccggtttccatagccatataacactccgatgcatgggatgttctgctcctttgccccaagcacatcatgcattcggtctccgaccatgatcaccttatctctgtctgtaatcttctcatgctccagcacatatgcgataacatctccttttctgacacgctccccgctcaattcacttcctccaataaaagtgaaatactctgtcaggtgaaaatactccaaaatctgtcttgcatacacctctggcttggatgtcgccagatagaccttctttccttgttctgtcagtgcttttaatagtttttcaatccctggatagacttcgttctcatatagtccccgcactgaaaaatattctctatacttttccactgcttccaccgcctgttcccggtcaaatccataatattccataaaagaatccgcaagcggcggaccgataaacttgcagagcatatcaagattctccacctctatcccataaaatttcagcgcatgtgcaactgcgcttgtaatccccactttcgggtctgtcagtgttccatctagatcaaataaaatatgctgatacatttttcttcccctttttcctttttataatttgctaaacacacttcatttcacactgctactcatgaaataaaatgtcatggtttacgctgctgtaaaatctttctttcacttccgcgtaactcatctgttccatggacatgatccacattaattttgtgatcactgcctccaatgtcatgtcgtatgcttcaatcagatcaaaatcctgtttgacctttttcccaacttcatagaccgtcatgttacttccttcgtttgccacctgcgttgtcatcaccacaatctttccgtggcgcacccactccgtcatctctttataaaattctccgacaatgctctccggcagaccgcctacaccaaaactttcaattaccacacaatcataatgtttaaaaatgtaggacaatacatccggcttcatccccgggatcagctttaatacataaatactgttcttcatctcatgatagaacgtgaccggcttcttataaggaatcgccggcatatagcgaaatactttctgatcctgtatcactgccggatacgggaaattaatgctggaaaatgcattgtaactcttggcgcgctctttcttcgcccttgttccgacaatgactttcccatcgaatacgatcgtcacatcctgagatgcatcgtctgacgcgtaaataaagctgtctaaaagatttgtcttcgcgtctgtcacatccatattgatcggcttttgcgctccggtgatcacaatcggcttctcagaattctggatcatataagacagtgctgccgcagtgtatgccagcgtgtccgtaccgtgacagatgacaaatccatcatactcctcatagtgttcctcgattgcccctgcaatcttcttccaatattccggtgtcacattcgtactgtcaatattgcacacctgaagtgtatccacatcacacacgctctctacctgcggaatataagataggatatcctccgaggaaagtcccggagccagcccggcctccgtctgttttgatgcaattgttcctccggttcctatcattaatatttttttcttcatactgttctcctgtctattatcttcctgttattttctattttccaaaaattttctctacaagactgcggtactccatatacgccggaacttccgagaaagaatttcgaagagcctcctctactcctttatagtaccatccaatcgtctctttgtctttcattcggaatcgttgccacaattcctccccgcactctggataatcccgatcgatatcccgcatattggacagcttatctgccagaccgatcatctgtacttcccgctctgctactttcagatgctggatcgtcgcacccttgcgctccatccacgtctttgatttgtcttcactttctttctgcacaagttctgccacccgcttggaaaacatctgctcgatcatctgcgccgtcactccctcgcaatcctcgatcgtatcatgcaggattgctgcactgataatctcctcatcctccgtcattctcgctacgatcacacccacttccagcggatgtaaaatatatgggcgcatcgtccctttccgcagttgcccgtcatgtgctttcgtcgcaaatgcgattgccctttggatcatctcctccacctcctgtattttcttctttctttcgattcccacctaaaacgatataccaatttcacctagttttattataccaatcgaacacactttttcaactcttctttccgatttgttctgagctgttctgtcatttttcaccagtttgtgctatagtaacattatatttttttcacggaggttctttatgcatataaccaatcaaaaaccagtcgttcttgttactggttcctctagaggaatcggaagagcgatcgcacttcagtttgccaaaaatcattaccatgtcattttaaactgctccacttctctcgaacagttagaaaatgtcaaaaaagaaatccttgcactgcctgacggctcctgcacttgctgccgctgcgatgtcagtgattcttcacaagtcaccgcaatgtttgaagagatttccactacttgtgggcagatcgatgtacttatcaacaatgcaggaatttctcacatcggtttgttcacagatatgaccgacgatctgtgggatcgcatgatccagacaaatctttcctcagttttctattgcagccgggcaaccctgccctctatgatttccagaaaaaaaggaaaaatcatcaatatttcctcgatgtggggaacggtcggcgcctcctgcgaagtcgcctattccgctgccaaatccggcatccacggactgacgagggcactggcaaaagaacttgcacctagcaatattcaagtcaacaccattgcctgtggcgccatcgataccgccatgaacgcacagcttagtcctgaagaacgtcttgcactggaagaagatatccctgcatgccgatttggtaccccggaagaggttgcttctctcgcatgggacttagcccatgctcccgcctatatgaccggacagatcatcggaatagacggaggctatatttaaaactggccttttttacttctccaaaagtaaatctgcatacggtcaatgctcacaaaatttttacacataagaaatgggtatagcctgcatttcagccatacccatttcttctataattatcggaatctacaattccaaaaactgcaataatatttctatttttaatcgggaaatataggagtcccaatcgatctgtagcattcggtctaacttgtcaatcctttttcgaatggtattgatatgtacatacattttctcagctgtcacgctgaaattcatattgttttccagataaactttcagtgtcctgagcagttctacatttttttcgtctttcatcatatccagatactctgatagcatctgttccaattctttctccggaatttgaagccatgcaaacgggccaatcatctcataatcccaaattttcttctttggacagagctttttccccattttcattactttcccacacgtttccaccgatgattttaattccgacattttcttgccttctcgcaacactgcaaactccaattccattttaggaaatgtttcaacaattttctgctcaaaatcagaaatcataccttccatatctttttgactatatgacaccgaatcagacaattccgttaaaactacccctgtattttcatcgagaaatgctaattttgcatttttagaaagctgactgtttttgaaaacagtaatatactgttctctggaattccgcgcactcaattcctcattcatctggtgaaacaatacacaggtatatcttgtattcatagaaatcccctgctgtcccgcctgataaagaagcctttcttcatcttccccggtagaatgcagcgcaagcaaaacaagattttcaaatccgatgttcccaatactttgtgcaatgacaatttgttcgtataccgattgtagcaaaaggtacgcaatccgaatggaatactcatcgtaataatctaagaattctcttgattccatcacaataaagtatgcctgcagattgcctccaatactaatcggcatcaaaatccaactgatccgcggaccatccacattatcttcattaaacattcggattcgtgtcatctgtatatagtcacataatgtatagcgattgtgttccattgtaggattccaataatcactttcctgcaatccataggtttctgaaattcgcttaaagtttgcagagctgcaatatccttcctgttcacctacatcatatagaaatgccggaaagcccatttccacttctactgcctgcaatatttttttaatcttttgaactttgtatgttgtcgaacctaacatcatcgcaccattctgatggatttgaaagcgccgaatggtccgattcatcacaatcgtattcacctgttgcatgacttccatatagccgatttcaaatggcatactgatcagcggtatttcatattgttcaaacagttcgataatctctttcggaatcatcggaagatatctccctcgtttaataatcattccggaagtgatctgcatcaatccttcatcaaaagactttttgatacaatccggttccatcaaaatagaataaccggaagtaattacaagttcctttcctttcgtccaacgataggcatccggagcatccatgaccgcaattccttgtacttctttctgtatccctttagaaccagctacaatatgaaagtctttaaaaaattcatgttccaataaagttttaattgaaattcccatattgtccctgtcctttctttgttctgcttgccatttcctactatcgttgcaagtttatcatcttctgtaattttctgtcaagctaggtccaccttttgcctaaccatgattttccagccaatccattgccgctttcgcataaatagcagctgcagtcggcaggcatgtctcattgaattttgcatgaggattatgatgtccaacccattcatcttgattgtccactcctgctccgataaagaaataacttgtcggaatcttctcaccaaagtaagaaaaatcttcagagcccatcacgtgaaacgtcggatatgcttttaactcggaatccagctccctgacagactgaataatctcttcatttaatttcacatcacattttactgccggaacatcgttaagcacttctagttccacctcacaacgatatgtggcagctactccttttgcaacttctttgatccggcagattatatagtctctgacttctgatttaaatgtccgaagagatccttctaatactgcgcgatgcggaatcacattaaatgcacttcccgattcaaaccgtccaatcgtcagcaccgcttcttccattgctgaaatttctcttgcaatcaattcttgcagagccaaatacaaatgaactcctgcattaatcggatcaatacctagctctggtgcagatccatgcgttccttttccggtcaaaagaatacggaatccatagacagaggtcatcggatattctccataaataatcttcttattttcactattcggtgctacatgcattgcaaatgcagcgtctactctcggattttctaaaacacctgcatccaccgctgctttcgctccttgaaaagtttcttctgctgactgaaataacaatttgacagtccctctcaattccctttcatgtgatttcagcagttttgcagcccccaaaagtgttgttgtgtgcatatcatgtccacaagcatgcatacatccgttttctgatgcaaaaggttctcctgattcctctcttaccggcagtgcatccatatcactgcgaagcatgaaacatttttctccacttccaatcaaagcaacaatgcaagaactttcttcatacacggtatatggaatatccatttgctccaactctttttttacaaatgcgactgtttttggaagatgtaatccaatttctggaatttgatgaagcgctcgtctccatgcacttaatttctcttgaaattcatttgcctcttttaataactgattctgcataatctctttccctttctacgaatgtgttgtccataatctattcttcatacattggtctatactccacttttttttctcgaaattcttctaggattttttcccgagtttctgaagattggtataaatcatatgcaattcccgccataacccgcgctgcactaagagcacctttttctccaatagaagagcctgcagaagctgatgcctgccatgtatgtggcgaaactgccgccggccaacacacagtagagatcagacacatcggcattatataactgacatctccgctatcggaagaagccgtcagtgggttcctctgatacaaatctcttattcccactttcatagccaatggaagtccctctgtgtcatacagttttcttgcattttctaccgtttcccctgacaaggtatcttctaattttgaagcaaatgctaattcctcttctgtgtaagatggtagtttggcttcttttagattctcatatgccaaatctgcatatgcatgattctctaaaagctcacaacatccataatctattttcatttccattgttgtttctgtcataaggcaagctccctctgccacttttcttacacgctccaaaatctcttttacctctgaaatgtgaggtgcccgaacaaaataccaggaacctgctcttggcggaacaatattcggagaaaatccaccgctatcggttgtataatgaatccttgctttggatgtcacatgttcacgcaaatagttcacgccaacgttcattaactctaccgcatccaacgcacttctgcctacttccggcgcaaatgcagcatgggagctttttccatagaatttaaagtgtgcagaagcactggcgagatatccactatcatacaccatgttcgcactcattggatgccagctaatcgccatatcacagccgtcaaacatatgatgataagacattttcacttttccagaaagtaactcctcttccgggcatccgtagaaacgaatcgttccttcctgattttcctgctccaaaaatcgcttcactgcgatcgctgcaacggtcgatgcggctcccaataaattgtggccacatccatgtcctgctgctccttcctgtactgcttctttttgtgcagatactgtctgagataatcctggaagtgcatcatattctcctaaaattgcaatgacaggagttcccgaaccatattctgcataaaatgcatgtggcaattctgcttcattcacaatgacaaagccttcttctgataagatcttccgaaaataatttgcactttctttttcttctccacccacttccggatgatcccataatctcttgcaactcttttggcacaagggctccagactatctacaatttgatgaagttctttttttgtcatctctatctctcctttgcctatcttcctaattacttatgcttctttttttgcagtgttttttaaggttgccaatccaatcgcgatgctaaggaatacacatcccattgttccaagccagttagatgcgccaggaagccaattaaaaacgcccattccaattgccgtatataacacaatcgcaatcactaccatcacaagactatgctttttcatcttgattccaaactgcacgatcaacgctccaaacaatgccgggagcagataattcaatgcagaaattacagaagccggaagcatttccaatactgaagttccaagaatggcacctactgttaataccgatgtattgataatgatagaaactgccataccaatagttgcaataacagaacctttttctgttcccggctccacatcggctgctacctgtgccatacttgcacatggaatacgcatattagaaatatttccggaaagaaatgccatataagttcctgccggaccaactactggaaaataggaaatcggctccacaaaccaaagcactccaaatgcactcgcaccactgacaaacgcagtcaaaagagctgccggtttcggaagcagtccgtaaactaccgcaagcgcaaccgctggtaaaaacgcaagaatcactcctacatatcctgtcatctttcctattctatttatttttggcatatattcatctttatagaaattattgctcattcattcttcctcccatcattaaatcaaagctgtaatgaccatcgctcctaaaatagtaatcgtcaatgaccattctcttaaccagccaatattctttttctccgctactgtcgaaagcacatacatgatcacagctcctaaaatacaggcaatcgcatttttatttgcaccgctcatagctactgcatccgctttctgcatcagaaaataaataggttttgaaagatggcttgcaaccattgcagcaaacacaccaatgatcgctgttgatgcaatcgttgtcaaagttcccgcatttcctttcgataatttatgttcaatcttttccattttatttgcagaaaatgttccgaacaatacccagccaactgaacaaaggatcattgtccaaattgccatggtaagcgcttcttttgtcattggatctgttcctaacgtcacaccaaccgctgatgttccaagtcccgctgcaatagactcaaacataacagaaccaatcatagaaagtcgcatccaaccaactggtccgccaactgtcaccaaaagtgataacataccgctcagtacaacaatcgatggccctatcgaagtcaccgcactacttttaatcgctttattcatttgtgttttcgtaagcccgactttttctcccgagcgataagcctcacgcgcaaagagaagtgcctgtatcatgacgaacacgaccggaataccacaagcgatccacataggtaaactgtttgcaagtttcataacatccattcttttttcctcctttttcttgccctacctcattttcctccatcatacctatttcccgaaaataaaaaaatgaaaatatcttcacttttcgacatgttttcccatgtggtgaagatattttcacttttctattactatttataaaatttctattaatttctcgccttagccatctctcttttgacaatatgtcttatttttctcttatatatacataatttttctccactccagcgcctttcgttccagatcttttacaaaggaatcttttccatcgcaatatccctcattgtcataggtaaatttctctgccagctctgtcttcagggcagcatacgcctccgcatcttttttatgggtgcgaagatagtctcgtactgccagatgccgctcaatctctttcctgctctcctccgcaaaaatgtgtacatgatgggtccgcaaatccccgcctttcataaaaaaacgacgacctaagatcccatactctcctttacactcataccccagcgcttcaaattccttattgtgcagatccaccgcttccagttcttttacaaccggcatcagatcaatgatcggctttgcccgcagtcccttcacggaagtggaaccaatatgatagacagtaatacagttttctcctaaaatttcttgaatcttcgcagcctcctgccggaatttttctttccattctggacaataatcaaccacttctatctttcttgccattgttttcctccgctattttatcagccgctgaatctgtttgctctgctccgttccagcctcttttagaagttcaaagagaactgcctcatacgttgttaaaaaggcgccttccttctcggcccgctttaacgcgatcttcctgtcataagcttttctgctggagatacagtccacaacaagaattggcacatgtccatgttcaatcagatcaatcaccgtctgaagcacacagatgtgcgcctcaatgccacagagaatgacaaaccgctttcctttgacaaactctttgatatcctcataggcgctgaagctgattttctccacatgttccttgatccccgctgcctctatgatctctggtaccgtctccccaagaccttttgtgtactgctgtgtcagacagattggtacttccaaagtcgaaagccctgagagcaaaatccttgaattttcaatcagcttttcctttttatgcatgaccggaacaagcttctcctgataatcaattccgatcgcaaccgtctgttctttctcaattctcatcacaatgacctccttcataaacatttcctaaaatagacccatgtttcttaacacttcttcagccttttcagcaacaaaaaatgtattgtatgcgtatatgcagctcgcaaaaacaggttagccgctaactgcgattttttaaaatttggctgacaattgcgtgagcagcctcttctttggacatcagttctagtgcaatttcttcctgcggtgtaatcatagtcactacgtttgtgtccgtcccaaatcctgcacctgcctgctttaagttatttgcaacgatcatgtcgagatgcttcttttccaatttctttctggaattttcaagcatatgctcagtctccatggaaaatccacatagaaactgttgtggatgcttgtgttccccgaggtattttaaaatatcatcagtccgctccaattcgatggtgagagcatcctctttctttttcatcttttctgcggcaatactggcaggacgataatcagcgacagcagccgctttgatgatgatatcctgcgattcggcatgttctgtgactgcatcaaacatctcttttgcagatgtgacagaaatcacagttgtaaatggcggcggggtcagtgcactttggccgctcaccagagtgacattggcgccacgcaacatacagtcacgcgcaagggcatagcccatctttccagtggagtgattggtaatgtagcggaccggatcgattgcttcctgggtggctccggcagtcacaaggacatttacccctttcatatctttctccattgcaatctcttttaaaatgtaattgaacagtgtctgctcatccggaagtttgccttctccgatatctttgcaggcaagcattccggtcgccggagcgatcacctcaaaatcaaattgtgtaagccgttttaagttatcctgcgtgatcgcattgcggtacatattggtattcattgccggcgcaacgatttttttgcatgtgcaggcgagggttgtcgttgtgagcatgtcatcggcaagaccgtatgccagttttgcaatgacgttggctgttgccggagcgatcagaacaacatctgcccgtttggcaagagagacatgttccacattatattgaaaattccggtcaaatgtatcgacaatgcatttgttgttagtcagtgtctcgaaggtgatcgggtgaataaagttcgtcgcattctgtgtcatcagtacatgcacatcgcagtgaagctttgtgagcatactggcgagattggcaatcttgtatgcggcaatactgccggttactccgagtatgactgtctttccttttaacataaatgattcctccaatctggtacatttctgaacatgattgtatcatatcacagcgcagactgcacgcgcaaatctatgtttttcttttcaaacatcattgcttttcagagagcgacatgctacaatagcgccgtaattgtattgtatccccaaaaagcataaggcttaccggggaataataacaaggaggaagaaaaatgaataacgaaacaactaacacaacgtcacaggtaagaggacttgtacaggctgcacttttcgcggcactgatcattctgatggctatggtcccatttttagggtatatcccgctcggattcacacgggcaacgatcatccacattcctgtgatacttggcgcattggtgcttggcccaaagaaaggagcttttctcggcttgatctttggattgaccagtctgatcaacaatacgatgaatccgacagtcacatcttttgtattctcaccattttattcactgggagaaattcaagggggatttgcaagtattttaatttgttttgtgccgagaattctgacaggggttgttccctactatgtatatcatggagtcagaaaggtgacgacaaaatggaaaacatcccaaaatacagcactttttgtggccgggatcagcggagcgctcacaaacacattgcttgttatgaatatgatctatttcttttttaaagatgattatgcacaggtcaatcaagtgtcggtggatgcggtatatggatttattatgacgatcattggaatcaacggagtgccggaggcaattgtcgccgcaatcttaacgatggtgatcggacgtattttgttaaaattgaaagaaagattacattaaaaaatatcagaaggatagtatttatgattttagcgattgatattggaaatacaaatcttacgataggatgttttgaaggagagcagatctattttgcagagaggctctctacggatctgacaagaaccgatttagaatatgcagtcagcatcaaaactatactggaactgtatggaatcaaggaaaacaggattcggggaggaatcatctcctcggtcgtaccaccgcttactaatgtgatagcgcaggcagcgaaaaaggtcattcacagacagataaaagttgtgggacccggagtgaaaacaggattaaatattcatatggatcagccggctcaagtcggaagcgaccggatcgtcaatgcggttgcggcgattgaagcgtatgaagcgccgatcatcgttgtggatcttggaaccgcaacaaccatttctttgattgatgaaaagaaaaattatgccggagggatgatcctgccaggagtggcaacagctttggaggcattgactgagaagacttctcagcttccaaagattagtatcgaacaaccgcggaaggcgattggaaaaaatacagtagattgtatgaagagtggcattatctatggaagcgcagcttgtatcgatgggatgatcgaccggattgaggatgagattggacaaaaggcttcacttgtagctaccggtggactggcaggcacaatcattccacattgtaaaaaggaaattccgattgatgaaacactccttttaaaaggacttcagttgatttataatagaaatgatgaaaaaaattaagaagaattataagatgacgatcgcctatgatgggggcggttataaaggatggcagaggctgacaaatgagcctggaaccatacagggaacgattgaacgtgtgctcagtgaaattgaaggaagtcctgtaaaaataagcggctccggaagaacggatgcaggtgtacatgccaaaggacaggtggctcatgtgtttctgaaaacaaacgaggatccggagttgcttcggcaagaattgaaccgaatgctcccggaggatatcagaatctgtcgcgtcgagagtgtttcccagtcgttccacagcaggtacagtgcagtatctaaggtgtatgaataccggatcgatcagagatcacgtgcagatgtatttacaagaaaatactgttatcacagaccggtgcatcttgatctggatcgtatgcgccaagcagccgatcacttgacgggcacacatgattttgggagttttaccgacaataaagaggctgattctgtgcggacgattttttccatcgatatgaaggaagagaacgagaagcttgtgctggcattctgcggagatggatttctatatcatatggttcgaatcctcgcgggaacacttttagaggtcggagaaggaatccgcacacctgagagcgttctggaagcatttcaccacagagatagaagtcttactggatttcttgcaccggcgcatgggttatgtctgcgggaagtgaattataaataaaaaatactattcataaaaataacagaagaaattatgaggaggtgtcaaactataaatagtcaagacctttttaataaaaatattaaatggtaaaaaaaggtaactttaatagaccatctgagtacatcgtatttcagatggaacagacaaatatatgtagagcagattttagcgaagtttctgagtgttaaagtctatatcttgcctctccaatgcatagatgactctgatcagtttctttgctacatgtgtaatggctactcgatgttttttgccttctgcacgtttctttgcgtaataggttgcaaaggtcaaatcaaaacgaattagaggaaggcaagcattaagaagtacgtatcggagctgtgatgaaccatgtttcaccattctgccgccgtgagattctgttccagaatcatttattccgggctcaattccggcaaatgcaagcatctgaccgggattagaaaagttagaaatatcaccatattcagcataaataacagcggctgaaattggaccgattcctggaatggtcagataatgaggatgtacttcttcaataagtttatgaatctcagattccaaagtatcgatttctttgaccagcgatttgtagagggttaataaactgatcaattcaatgtcaaagatagaattgttgacaccaactgtattggcagcaagctcctttaagcggagaaactgctgaatagaaaactttcctctggaaatgcaacgtaacttgtcataagaagcagaattcatgcgtgccattttttcagcagaaccatagttttcaagtagatacaaagccgttttggaaagtctttcattaaaaaaaggcttaaattctgggaaagtatggtctaagacattggtgatttttacaagataaaaagaacgttgacgaattaatcgatctcgtaaacgagttagtgactttaaagaataagagtggtaaaatccttttgaatggggtttgtactcaacagtcattaaccagcgagctatcgattcgcagtcaacagagtcggttttggttcgccttaaggtcgtagactttttgtattccttgataagaactggattaacttccatgaagctgtggtgggcattttcaaggaagagttcgagattgagggcataatgggctgttgattcaaaccctatttttatatcctcaggattggagagagaatttaaaacagtaagtagttcttcaaaacctgctttatcatttttaaaagtgaattttgaaactactttttgatcagctgcagatataatgcagcaatcgtgcttgtacttggaaatatcaattccaacaaagtacatggacatagaaatatacctcctgaattagtatttaggcactgaagtcttccacagagaattcgactgtgtaaacacgtaaatagaaacgtcaagcgttaacaaactaattaccagtaatagacgaaaagctgtggtctgagacacctccgaacagtcaaagctgtaaaaaaatagagacagatccacagtgccttttcaaactatatcagagatggacttaaatacccagagttaatctggagaaaggaaaaatccaattaccatctaagataattggattatacgtggataaatgaaatttatttcatggaatgtcaatgggatacgtgcctgtgtccaaaaaggatttttagactttttcaaggaagcagatgcggatattttctgtatacaagaaagcaagatgcaggaaggtcagcttaagttggagctggaagggtatcatcagttctggaactatgcagagcggaaagggtactcggggacagcaatttttacaaaacaagagccgctttcagttgcttacggaattggaatggaagaacatgacaaggaagggcgtgtcatcacactggaatttgaggagttctattttgtgacagtctatacgccaaactcacagaacgaacttgcaagattagattaccggatgcagtgggagacggaatttttgaagtacctaaagaagctggaagcgaaaaagccggtgatcttctgtggagacttaaatgttgcacacagagaaatcgacttaaaaaacccaaagacaaaccggaaaaatgccggatttacagatgaggagagaggaaagttcacggaactgctttcggcaggatttattgatacattccgctatttctatccggaacaggaggggatttactcctggtggtcctaccgttttagtgcaagagcaaagaatgcaggatggagaattgactatttctgtgtgtcagaatgtttaaaagaccgcctcagagatgcaaaaattctcacagatgtgatgggatcagatcactgtccggtagaactggattttgaataaaatagttttgccaaaaaaggcggcaggctagtccattcccggacacagcctgctgcctttttttatcttgatcttcaaaacagtgtcaatcggatccggcagcggataagtaaacaccggatttgctccgagcgacacaaatgcaacatcttggaataatactgtgttccatgcttccccgcgtgtcatctcacttccatctgtaagataatacaccttttccaaccgatccggtgcaattccatataggggaagtgctccgagcggcgcctcataaacatgtgcataaatcgtatccccattctgcgtgtaccttccccactccggttttggaatttcagagattccgcagccatagatactctctccattttgctccatccatgctccgatctcctcaagaatctgcacactttctttcggaattcttcctttcgcatctggtcccacattcagaatcatatttccgcctttgctcgtacattctacaagctttcgaatcagcatatctgccggtttatattcatgatcaaaattgcagtatccccaatgattattcatagttgcacaaagttcccatggaatgcgctccccattttcatctatgatcccttccggcgggatgatctgctctgggcttgcaaaatctccgctatagatcagaggttccgcagttgcaatacttccatgattttccccagacccctccagtctgttgtcgatcacgacatccggctgatattttcttaccatctgaatcaattctgtcgcacgccatgtttctcctctcatgtcatcgtaagaaaagtcaaaccataacaggtccagttttccgtagtttgtgacaagttcctttacttgaccgtgcataaaatcaagatatctgtcaaagtctatctgtgcatccttgtatctctcctgatttctcatcgggtgatggcgatctccgtacttcggaaaatctggatggtgccagtcgatcaacgaaaaatacagtccaacccgaatcccttctgcccggaacgcatctagaaattctctgacaagatctcttcctgcctttgtatttgtcgccttataatctgtcagtgccgaatcaaacagacaaaatccatcgtgatgctttgccgtaaggaccgcatatttcatcccagcgcgttttgccagctttgcccactctttcggatcgtaagcagtcggatcaaactcttggaaatactgttcatactcctcattcgtcatttccctctgggacatcacccactcaccgcatgccggaattgcatagattccccaatgaataaacatcccaaatcttgcatccataaaccacttcgttctctctctgattgcctgattcattttctcactccgttctcttttgtcatggaaaccctcttacttatcaagaattgattttaactcttccacaaaagtattgacatccttaaattcacgatacacagaagcaaatcttacataggcaactgcatctaactctttcagcttgtccatcacgatttctccaatcaccttgctcggaatctctttctcttctctgctgaaaatctctgtctctacttcctccataaacttctggatctgatctgccgaaacaggtcttttgtagcaggcactcagcaccccagattcaatctttcttctgtcatactgctctctgttgtcatcttttttaatgacgatcaacggaatcgtctcaactttttcataagttgtaaaccgctttccacactcatcacaggcacggcgacgacggatcgagcttccatcgtctgccggtctggaatcgattacctttgtatctggattattacaataaggacacttcatgttctgttccccttccacatttttctttagtatatcggtaatggaaatcaatgtcaaatcatttgcatggaacaaggtatttttcttcacagatttccacaaaaatgatatcttcccctatttttttaatgcaggaaaatggaatcacatactcactgtccgatcctagaaaaccacagatttttcccggccccggaatgacgattgcctcgatacagccactgcacgcatcaaatacaagatccaccgggtttcccagccttttacagttacagacattgatcacttccttttccctcaactcacatacccgcattttctccccctttatttcttctatttcgttttctatgttttaatggacatatctgtcacacagctgctcaaatatttttacatgacactgttcatctaagataatccgctccaaaattttcctgatatgacaatcctgtatccattctttctgtctgcggtattttgcaatggtctgttgctccccgcgaagtgcattctgaagaatgtcaccgatgtttctggaatattgattgcaagcccctgaccagtaacgatatcgtcctctctcgacactccacatgcgtggatctgctccaagtagattcgcaagtgtcgcaaaagtgtgtaaatgatgcatctccacaatactgatcttatgaaaacattccgagatttcttcaaatttcccctccgcaatcacgccattgtaaaagtaaagactgactgccgacatttcagagtcacacgctcctacattgccaagcattgctgccgcatactgtctgtttttctcctgcacacagacttctgggtattctgatttgtccgcataaatatattttgtttcttccattaaaaaaagcctccctgatccgttctaccatacaatctatggcagtcacggataaagaagacctcttttctattttcttttttactttttcacaacaggatgatcggccgctctcttcttgcttctcagaaagcaccgcctctctttttccgccactaacggatatcgataacagacaccggacagctgtctcttgccgcttttgcttcctcttcattttctgctgtgacttccgcatatgcctccgccagcccgtcatctccgaaccggaacacttccggacattctccaacgcatgcgccacaggaaatacatccttcttctacaatcgctttcatgcaatgcctccctactcagattttaactgttttttcagcggatatccgcttttctttctctgagagtattcccgatctctgttcttttcatacactttcaatataacttattctattctgcaaactggcttttgtacaactctgcatagaatccatttcttgcaagcagtgttttatgatccccctgctcaataatatttccatctttcatcacaaggatcacatctgcttcccggatcgtggaaagtctgtgcgccacaataaagcttgtccgcccctgcatcattttctggaatgctttctgaatctgtatttctgttcttgtatcaatggacgatgttgcctcatcaagaatcaacatcggcggaagtttcagcatcactcttgcaatacacaaaagttgcttttgtccttgtgacaaatttcctccatcctcggtaataaccgtatcatatccttccggcatacgtttgataaatccatgggcatgcgccgccttcgctgccgcaataatctcttctcttgtcgcacccggatttccatatgcaatattttctgcgatactgccagatttcagccaggtttcctgaaggaccattccaaagcttgcacgcagactgtcttttgttacttttgaaacagcatttccatccagcaatatttgtccgccatccaaatcgtagaatcgcatcagcaggttgatcaaagtcgtcttcccacatcctgtcggacctacgatcgcaatcttctgtcccggcttcacagtaagattaagatgctccaacagtggtacctcaggctgataggagaacgatacatccacaagttttacttctccttgtacctgacttaagacgactgcatctttctgatccaccgtctccgtttcctcttcaataaaatcaaacacgcgccttgcgcaggcaagcgcattctgcagttctgtgatcacactggaaatttcattgaacggctttgtatactgattagcataagtcagaaaacaggacagctgtccgacagaaatcgctcctcgcatcgcaaagactgcgccggtaatcccaactcccgcatacacgagtccattgacaaaccgtgtgcttggatttgtgatggaagaaaaaaagattgctttgagactgcatgtctgcaagttccgattgattgcatcgaaccgctttaacgcttcctccccataaccgaatgcctgcactgttttctgatttccaatcatttcctccacaagcgaagtcatctcagctcttgtctctgactgcttctgaaacatcgtatacgttctttttgcaataaagcttgctacaaataaagataccggtgtgatcaagatcacgaccaacgcaatctgtacatgaataccaagcataaagacaagcgttcctaaaatcgtaacaatcccggtgaaaaactgggaaaatcccattaacaatccgtctgaaaactgttccacatcggtgatgatccggctgatcgtctccccctgcgggtggctgtccacatactttaagggcagcacctgaagtcttgcaaatgcctttatcctcacatccttcacaacacggtaggtgatccggttgttgcacagattcatcagccactgcgccacacaagtcagcacaatgacaactgcaagttttttcaaaattgcaaaaacctccggaaaatttacctgtccttttccaataagaacatccacaccgtccccgatcaaaattggtgcatatagtgtcagagcgacagaaatcatcgcaaatacaagtgacaacaataaaagatatttataaggtccgatcagttttaatactttccccaccgttcctttattctttttcatattgctccacctcctctttggaaagctgggaataacagatttcccgatagacctcacatgtttttaacagttgctgatgcgtaccgatccctgcaaccataccatcatccataacaataatcttatccgcatggagaatggatgccgctctctgcgatacaagaaagactgtcatatcctttgtcctctccgcaatggctttccgaagctttgcatctgtcgcaaagtccagtgccgatgcgctgtcatcaagaatcaatacttccggcttccgcacaagcgcacgggcaatcgtcagtcgctgtctttgccctccggacagatttttcccgccctgactgatcatcgtatcaagtgccttcggtttttcctgaacaaactcttttgcctgtgcgatctccagtgcttcatagatctcctcatcggtagcatcctgtttcccccactggatatttgcacgaatcgtcccccggaataaagtagctttctgcggaactattccgatttttccacgcagcttctccatcggatactctttgacatctgcaccatcaaaaagtacacgtccttctgatgcatcataaaatctcgggatcaaattgaccaaagttgatttgcctgatccggttcctccgataattccaactgtttctcctttgcttacagaaaatgttacatccgaaagcacaggttcttttgatccatgataccggaactgcacatgatcaaacaaaactgcttcacactttttatcagatactttttccattctgcttttcggagattccatcgttgtacaaatagcaaacacctcgttgattcttcccgcagatgcaagcgcctttgtgaaagatacgatcagattcgcaagtgccacaagtgcgatcagaatctgtgtcatatagctgacaagcgcgatcatctccccctgtgacacctttcctgtattcacttcaaaagctccggcccacacaagtacaatgatcgctccattgacgatcagataggtcagtggattcatcagtgctgagatccagccgactctcaactgatcctgcatcaatgtatgactttccttttcaaatgctttctgctcctctttctgtgtccgaaatgcgcggatcacgcggattcctgcaagattttccctcgtcgtcaaaagaatctgatcaagccctttttgtactttcttatagattggaattgtaatcatcataattccatagatgacaatggaaagaagcggtactgcaacaacaaagatccatgccagtctgaagttgactgtaaatgccatgacaaccgccccgacaacgataaacggtgatctcaggaacagtcggagtacaagattgactccggactgcacttgattgatatcacttgtcattcttgttacaagcgttgcacttccaacttgatcaatctcctggtaggacagcgtgctgatatggcgaaacagatcatggcgcagctccgtcccaaacccaactgctgcctttgccgcaaagtactgcgccgtcagcgaacatgcgagaccaatcacacctaacagtattaaaactcctcccattttcaaaatgtacggcatatcccggttctcaattcctacatcgatgatctttgccatcacaagtggaacaatcagttcaaaacatgcctctaaaagcttaaagagcggaccgatcacactctcttttttatatcctttcagatatggaatcagttgaaacatcttttcccatctcctccttctaatgattctttctcattatagcgatttccgcccggaatgacaagaaaaaggaacactgaaaaatgtattttacaatggagttccgttagacataccacccgagcggaaataaatattttatatagtctacagcaggcaagtaagcggagatattgatcaataccggacaaagcaccagaaacaattctatcaccactcctctgctctctccgacagccataaccacaccaatccctgtgactgacggaattgttacagctgcaagatatccgagatactcaaatctcttccgtcttttccggtctaaagctagacagattcctctgccattcccttcaaacctccgtccgaatgtcatccagagcaaaacaaataaaactgtcttttacatttttttacaaatactgcgataaagtgctataatattctaacattcgatcatgatattttctaatgttatctttggaaggagaatttgaaatgaatataagcaacatcagcgatcagctttatacaaccgcaccggataaaacaggacggctcccaaaggaaatggccgtctattctcttctagatgaactttccatcccttacgaacgcgtagatcacgcagtcaccgagacaatggaaacctgcgagaacatcgacatgcttctcggcgtgtccatgtgcaaaaacttatttttaagaaaccggcagaaaactgctttttaccttctgatgatgcctggcaaaaaaaagtttaagacgaaagatgtctcaaaacagcttggcacctcccgcctttctttcgccgaggcagaatatatggaacaatatctgaacatcacaccaggatctgtcagcgttctgggactgatgaacgacagcacccacgccgtacatctggtcatcgataaagaattactggacaacgaatatatcggctgccacccttgcatcaacacatccagtctgaaaatacgtacagaagatatactgaatgtatttttaaaacataccgggcatacatggacgactgtggactgatcctaaaaaatacgccttgtaagagaattcactttttctctctgcaagacgtattttcctaatattctccctgccatctccccgaaacaatttccttgatctctccggttctgagacttgcaggaacatctatgatcctctgatttctgctcccccggtatgcaagtgaaaggcttctttgctcttcgatatacggtccatcaatcagtacatccagtttctctaaaagcatccgctgctctcgggatccccgcaaaagttcttccatagtaaatcccgaataactcgccacttcgtatccccggttctttaattttcctgcaagctctgcaaatgcctctgcctgactaaacggctccccgccagaaaatgtaactcccttggcaagaggattttcctcaattactttgacaagatcgtctgccgtccaccaggttcctccgtcaaattcccacgtttccggattatgacatccttgacagtgatgggggcatccctgtgcgaacaatgtcatgcggattccaggtccatctacaatactgtccccggcgattcccgcaagccttagttttctattgtcccagtccatgttttactctgtctctctcttctgctttttttgcatcattccacttgtccattgttcccacaagatatcccgtaattcttctgattctctcaaattttacatcttttccaatcgtacatctttcttccatactaaatccttcctttcactaacctatctattgtcaaaatatctgctgccttttcctgaaaatattctcttttcgtactatctgcatccgcaaaattgcggcatttccggatatagctttctcagttcttttagcttttcgtcactgatcggctctccttccctccgtccgcatcttgggcacacatcatcgatcacacctacatatccacaggctggatcacggtctaccggatgattgacacttccataaccaattccggcatcgtgcatacagcggatcacgctctcgaatgcctccacattttttgcagtatctccgtccagttctacataactgatatgaccgccattggacagtgcatgataaggagcttcttttctgatcttctcgtacgcggagatcggataccagaccggaatatggaaactatttgtataatactctctgtctgtcacccccggtatcttcccataacgtttctgatccatccggagaaatcttccggacaagccttctgccggtgtcgcaagcaacgtataattcatcttagtttcttttgctttcgcatccgtaaatgcccgcatatgaccgataatctcaagccccttctgctgcatctcttcactttccccatgatgctttccatacagtgccgtcaaagtctctgccagaccgatgtagccaatcgatagtgtcccatgttttaacacttcccggacttcctcgtttggtcctagtttttccgaatccagccacacaccttgtcccataaggaatggataattatatacacatttctttgcctgaatctcaaaacgatccatcaactgtctcgcaactagttccaacattgcatccaatttctgataaaatactttctcgtctcctttgctctcaattgcaagacgaggcagattaatcgaagtaaaggaaagatttcctcttgaatacgcaatctcatgctctggatcgtatacgttccccatcacacgagtacggcagcccatggtagcaacttccgtctccggatggcctggtttgtaatactgaagattaaatggtgaatcaagaaatacaaaattcgggaacagcctttttgcacttaccttgcagcttaatcggaataggtcatagtttggatctccctcattataattgaccccttctttcaccttaaaaatatgaattgggaaaatgcatgtctccccatttcccagccctgcatctgttgcaagcagtacattccggatgatcattcttccttccgggcttgtatctgtcccgtagttgatagaagaaaacggggtctgcgcccctgcacgactatgcatcgtattcagattatgtacaaatccttccatcgcttgataagtgtcgcgctccgtatatttctcggtacgctttctgactttctcagtaatgtgtgctgccttttcttctgtaaaatgatatcgttcgcaaagcttctgctgtaccgcacgatcaaatacttcttcctcctgttttagccgtggaaacagttcttttgtctgctttagttcatctaacatctgcgtaatctgtacttcttcatcctcaagatcagccagatcctccaccgcttctgtaagctgctttttataaattttttggaatgactttgccactcccttcgccagtccgtaatcaaagtttggaatgctctgtcctccgtgttgatcgttttggtttgactggatcgcaattgccgccaacgccgcataactttgaatacactgtggttcccggatcactccgtgtccggtagaaaatcccccctgaaatagtttctcaatatctatctgggtacaagtagttgtcagtgaataaaagtcaaaatcatggatgtgaatatctccctcccggtacgccttcgcctgttccggtgtcagcaaatatgcctcattataatttttcgctcctgccgctccaatctggagcatgcttcccatagaagtatttccgtcaatattcgcattatcacgcttcatatcgctctcgcgcgcatctatattcgtaatctcatcgattgttttcatcaagcttgtgtttgcttctcggatatgtgttctctgtgcccggtacaaaataaatttcttcgccgactcctcgaaccctttcttcatcagagcccgctctaccgtatcctgcacctgctcaatctgaggaggcatatcttccggcaacttttcaagcttactctgtacatcgtttgccacatttgcagcatctgtcgcatctccttcacctgctgcctccatcgcctttaaaatagccgatgcaatcttgctttcgtcatacagtaccacgcggccatcccttttgataatacttctaatcatcctgtctatcgccctttctatacaatatgttgtgtctattcagtattatgatactaaatatccacaaagtcaatacctatatcatgtaccacaccataccggataccatattcgacattgctgtttcccagcatttcatccacggttcgtactgcaaaaacaaaggagaaatccactgttttcaagggaaaatattaaataaagaagtgggaaaatttcattgctaggggagatggatgagcaggttattttgggaaattttgtcgatgaaatttatacgagaaccttttttcccttcagcaattcgatggctgtttctagagcggcagactatctctcagacacaatgccccatatcccacctgcggatttggatattctgtaaatcctggcaatggtcttgcgcctctcctgagataagcctttactttttctccatataaatatggatcattccccctcacgattccccactccatcataagtgccgccgctccggaaacaaatggtgtagcaaacgatgttccggtgaatgtctgataaattccggacggtgtcggcgctgtaatatctactcctggcgccacaagatccggtttactttctccttcaagtcctcctcttcccgaaaaatctgcataggcaaacgtcaatgaatcgtatgctcctacactgatcactctctgtgaagtcgacggaatcgtcaatgtccccctctcggtcgggtagcggaatgcagttcccctgttcaagacattctcactcggaagccataagtcatattcccctgtcacaatttttcttggagtcagaacaaactgccatatgcccggcgtaatatacgaatcttttggaagaaactcgataaaaatctcctgtgagacatgaaacggacttggctctccataatacagcagaatttccgtatctccgaccacaaaacgttgtgtaccgattacctctggtatcggtccgatctgcacacctgccggagaaatcagagagatatcaacaatgtcatggtatcttttccaaatctgcacattgattgccgtctccttcatctgtaccgcaagcggaatccgctcttccgtattctctttaaggattcctgcagtatgccccgcacttgcaccttcatttcccatgccgatacagatcacgctcttccacaagtttgcaatatccgcaataaatcgctccaacaaacttgtgccggtgtgtgaaccatatgtatttccaaaactgatattgattgcgacaggtcttcctgctctctgagccttctttaccacatagtcaattgcctgcatcagttcggtcgttcttgggaatccttcctccctcggtgtaccgagcttgacgacaagaatcccgctctcagatgcaactccctgatagcgggctcctttacttcctcttccatttcctgctgcaattcccgccacagcggttccatgcccagatcgatcttcacttggtacaattttcattcgttctgtccggttctcctgctgcagcgcctcattaatcttttcctgcgtgtattctgttccctgcacatagccttccggtggatttccgggaatcgtctgatcccagagtgcataaattctcgtcgttccatctgcattccggaaatccagatttgcataatcaatccctgaatcaatgattgccacaagcacaccggccccataaagttttggcggtcggatctgcaccgaagtcatacaggacactcttcttccattttccacttgaaaaaacaatcgcttgggcttctctatatactctaccgcctcaatccccgccagcgcttccagacgatcttcccggacagtcacaatagcaaactcattactcaattccacaacactttctgcaatttctctaacctgcccaagcgttcccgaatattttatgatcacttcccatgttcgtgcaatcgggtagtatcccacatccaactccaaagatttttctcgttcttcttcacttgcactcagtgccagattcaataaattttcaattttctggtctgccatatgatcaccccatcacactttattcagataggatggcaaaaatacctttgcttttttaattcttctgttttattcttctgttttactcttccatttcacttcctgtcaacgctcctgtatacggtgcaagtgacagtgggataaaatatcctctctcatgcctgcacaacggacagatttccggaacttgttttccggagtggatatgcccacagttcagacacatccattttccttcttttgccgcctgaaaataagaaccatcctccaaaagtctttccactttggcaaatcttctcccgtgaagtttttctacctctgcaatctgaaagaacgcagaagcaacctctaaaaatccttcttcctttgcagtctctccaaaagcctgatacacatcatctgcttcctcgaattcattatgttgagccgccttcaaagccccaagaatctgttcgttgtcgtcaatcggataagtcccctgaatttcaatcgtctcccctgtcatctctttcaacagctcatagaaacgctctgcatgtgcccgttcctgctccgctgtaaataagaatatcttttcgactgcatatagtccctgcctgcgcgcaagctctgctccaaaggtatagcgatttctggcttgactctctcccgcaaatgctttcatcaaattttcctttgttctactgtttttcaaactctgtgccatagtttcctacctctttcttctcacaatttcacgattctcccatcgttacactcagaagtatgttaccagacaccgtcttttatacattcttttccattttcttctctgatgctctttgcacaacgaatatatttccaacacagcaagaaataaaaatgaccgcacgttaattaaatccgatgatccttctcgccacctcatacgcaagcaccgatacttttcttccggaatttcccggaagattcatcgtctgtccaagaatactgtaccgaatcttccaatatacccgataatctacttctttcagatacttccagagcgcctttttcttctccagattttcctctgtcttagagcggatcagaataatcgaagatactgtcatcataatcgcaagatagttgatcatgtaatttctcagcttcctgctggaaattttccgcatagaatacatatctatcatagtccttgtcacataaagctgctgatcaatacgtttgatcatatttttctcattgactgactgatcctctcttccgataaagtaccggtaaaaatcaacatcaagataatatagtgatgtaacatgcggcaaaggatagtacacataaatgttatccacataaaatgtatgctttggcagcttcaatccacaattacgcaataattctgtccggtaaatcacagaatgcatcaaaatatactgcgacagacgaaatcttccgatatccccccatgtcatgatgcgatcctgcggaagtacattccggtaatgaatcactttcttattcttcactccaaccttttcatatacataattagagatgagcatgtccgtcagacttccctgctgataccatcccttcaatacatccagaatcttctcaagcgccgtctcttctacccagtcgtcgctgtctaccactttaaaatacataccggatgcatggttcagcccttcattcactgcatccccgtggcctccgttttctttgtccaccacttttacaatggtcggatattctttttcataccttcttgcaatctctaatgtgtggtctgtcgatccgtcatttacaataataatctccacatcttctccccccggaagaagagactgtattgcccggtccatataatcctccgaattgtaacatggaatcgcaatggataaatatttcatttcgttcacctcatctattttcaatctttccatagtataatccatttcctgacattttccaacagctatattgtaaattcctgatatttccgatatagtagaagcataatcattttttggaggtaatttacatgaaaaatataattgtaggacagtccggcggaccaaccgctgtaatcaatggaagcctttacggtgttgtaacggaaggactccgtcagacagatgccatcgagacagtctttggaatgatcaatgggattgaaggatttttaaacgatcaggtgattgacatgcgtccactttcagaaaacggggaattagagcgaatccgcacaacaccgggagcatacttgggttcctgccgctataagctgccagaagatcttacagatgctgtttatcctcaattgtttgagaaattttctgacagaaatattggctgcttcttctatattggtggaaatgactccatggacactgtcagcaagctttcccgctatgccgcctctatccagagtgatatccgtttcatcgggattccaaaaacgatcgataatgaccttgtggaaaccgaccacacacctggctttggaagcgctgcaaaatatgtagcttctactgtccgtgaaattgccatcgacgcttcggtctacgacaataaaaaatccgtcacaatcgtggaaatcatggggcgccacgccggatggctgactgctgccagtgtccttgcccgcaaatttgaaaaagataacccagttctgatctatcttccagaagtcgcttttgaccaggatgctttcatcgaaaaagtatcaaaggcactcgagacaacaccaaaccttgttgtatgtatctccgaaggaatcaacgacggtaatggtacatttgtgtgtgaatatgcaagcgatgtcggagtggacaacttcggtcacaagatgctcacgggttctggaaaatatcttgaaaacctcgtaaaagaacgtcttggtattaaagttcgctctgtagaactcaatgtcagccagagatgctcttctgcttgtctctctgctgccgacctagatgaggctgtctgcgcaggaacttatggtgtacaggctgcacttctaggggaaacaggaaaaatggtatctttccagagaacaaatgacaatccttataaacttacctacacaaccgccgatgtaaacaacatctgcaacaaagaaaaaggggttcctctttcctggatcacaaacgatggttctgacatcagtgaagattttatccgctatgcactgccactgattcagggaaacgttgaagttccatttgaaaacggactcccggcatttgctttccgtcgataacttgttgccattcacattttgttcatatttctttcaaatttttttcatttgattcacacggtttcttcatttctatgtcatatactaagactatcaaatgaaacaacatttgaaacagacgttaacagtattcacatacttttagaaaaactttttcataatacatgccagatgcgttttataccatctggcatcctccctttttagggagtttttatgtctttgtcctgaaaataaaatttagaatccgtatgctcttttcaatattttaaactgttcttgttcctgaatttctggtagttccgttaggatcccctttgtcacctgtgctttcatctcaggctccaatccctccacattccataaaatctccaaatatgtaagcgcaagcaactttgactgtggaagtacctttctgcctctcctgcagatctccgctgcatcatctatccgatcattctcctcataccgctgtgccagacagagaaatgcctcttccttttccgctcccctaccactctcctttaaataaatttctaacgcaagtacctgtccatctattgtttgctcccgctctgaaattttccaaacaacctcttctagtttctctgtatatccgaaattttctaaggtcgctccctcttgctcccttgcctcatctgcctgtatgatttttcccttctcttttgactgatctgtcatcctttttccaaccgcgcttccaaagatgaccatcactgcacagccaagggcaaccactggcattttcttttctatttctctttttcgcctggatcttaatttcgggaaatgcttctccaccatagaaaaagtaatatatcccttctctccatctgccttcagacaattctggatcagctttgccaactggtattcttccttttttgtcaatggaggatccggctcactctgggacaacatatattgaagtgttctgccaaaactataaatatctactgcctcacagattcctttctgcctgtaaatttcgggatttgagaagtatttccgcaccgtccggctttgaatctgacgtaccgtttctctgcttccttcggcctccagatccaaaagataaatctcttcgtcctcctttacaatgacgctgtatggacttaagtaaccataagtttgtttttctccgtatttatgaaaccatgtgatctgcagaagcatctttcgcataagattccacaattcctctttcgctgtctgcgggtgatatttcagccaatagatcaacgtctgtccgaaaattgtatcctggatccgctcacaatattttccatgctgtaccattttaataatatcgtattccttcttctccaaacacatgcctccttttctctccagtacacagaatgtttcctatgcccatgtaatttatattcctttgttttctttatgatttctattggatttttcagaatttgtcgaattgtattttgaaatctgttttttacagaacggtcaatcatcacgaaagtgatggaaaaaatgaatgattttatttcaatatccttataggagtctcccaccgggagagactccattgctttgtttctcactaatcaatcggtcgatacagatgtctcggaattccatctaccataaccggagatacatccccctgaatcagcggccgcacataagtgataaactcatctgtcacataagtgccttccttatttacccattctcttggaacaagacgctcatcgttcgcaatcttgtgcacatcttttacctcagttgtacattgatatggatcatcggataaccgaagcatgacaaccattttcccgctgtctccttcatctccggctttcactgccgcaccacctacctgactcgcttcaaggatatccactctcgaagcagaatgcgatgctgctctctgcaacgtgctaagttctacagctcttgtcttgcatccgatctctcctgcgatcagcgatgccagatagtttgcagttccagtcagctgcttatgtccaaatgcatctacaaaatctacattagaaccgagttcgcacacatatttcccatctgcggtcttgattccctcggaaactgccacaacaactgaatatttcttctccaaaagcttcctcacttttgcaacaaacttgtccacatcaaatacaagttccggcagatagattaaatctggtccttcacagtcctctccttttgccagtgcagctgcacctgtcagccaacctgcatttcttcccataatctctacgatggtaacaagtccgtgttcatagcgcaggctatgtccgtcacggataatttcttttaccgatgttccgatatattttgctgcacttccatatcccggtgtatggtcggtcagtgccagatcattgtcgatcgtcttcggcaccccaagaaaattcgtatgtccacgccccgttaccatggaataatcgtaaagcttcttgatcgtatccatcgaatcatttccgccaatataaataaagcattcaatatctaattcttcaagaatatcaaaaatcttctcataaacttcctgattctcatgaatctctggaagtttatatctgcaagaacctaaaaatgccgccggtgttcttctcaatagttctacatccagatcacttctgataaaatccgaaagatccacatacttgccttccatcaatccctgaatgccatgcagcatcccatacactttctttgccccacgctctcttgcagtgcaataaacaccagcaaggctcgaattaattgccgctgtcggacctcctgactgtcctacgatcacattccctttcatcatatccctccagttcgtttgtcaatatccttatattagtatattttgcacttattgtaaataaaaactttgtttcttttgtttatttttacttgtttttgataattttcatttcattttgatatttttcatcattattttatctatttttcatgattttctagctctatttttatcaatatttccatttccgggatttcatctgaaaaatcttctgtaaatttgcattgcacgtttatctccctaggattataattcaaatactttcaaataacagacaaggaggaatgttgtatgagaataacccccatcgaaaaagaagataagaccggaaggatcatcacactcagaaatgccgagatttcagatgccgagaatctaatcacttatatgaagatcaccagttttgaaactccttttctgctccgggagcccgatgaatttcatctcacctcagagcaggaagaatgctttattcagaatacgatcgataatccccgggaactgatgctcctcgcaacagcggacggctgccatatcggaaactgctctctttccggcgctggtccatttaaaaggtatcagcatcgctgtcagatcgcaatcgcactgtatcaaaaatattggggctgcgggatcggacagatgatgttaagtacgatactttctgtcgccagagaactgggatacgagcaggcggaactggaagtagccgcaaataacacctccgctgtcgcgctctacaaaaaattaggttttcagacctacggcacattccctgataacatgaaatatgccgacggttcttacacagatatgctttggatgatgaaaaagcttatctgatcaaaaaatatttccaaaaacagaaagagatacaagcgtgaaattcttgtacctctttctgttttatttttctttgattctgttttctatcggagattctccggtccaaatccaagtggaagtaattctttcagcaaatatttgttccatccgcctttcccatcttccagcacaatgtaaaattcatccggtctgcaaaattcctgcatgacctgcctgcacactccacacggtgcacatacatttccgctgcgccctgttcctttgcctccgacaatcgcaatcccttcaaattcccgctcaccttctgagactgctttgaaaaatgcggttcgttccgcgcagtttgtcggcgtgtaagatgcgctctcaatgttacagccataatataacttgcctgactttgtaagaagcgcagcccctacgcgaaaatctgagtatggggtatatgcgtactctctcgctctgtatgcatgttcgatcagttctcgttcatccatctattgttctcctatcagacgaatcgtctcggtcacaagcgccttaaattcttttgccactcgatctgctgtctcttgcacttctttgtgattcaaaggctggttggacattcccgctgccatatttgtgatgcaggagattccacatactttcaatcccatatgtcttgctgccatagcctcacatgcagtgctcattccggctgcatccgcaccgagcgcacgacacattctgatctctgccggagtctcatagcttggtccagtaaactgcatatacacaccactctgaatagaaacttttacatttcttgcagcctgtttaatgatctcacgaagtcccttatcatacacttcactcatatccgggaatctcggtcccagttcatcaagatttgcaccgatcagcggactcggcactgcggtcgtaatctgatctgtgatcatcatcaggtcacccggctggaagttaaagttcacaccacctgctgcgtttgtcaaaataacggtctttgctccaagcaatcccatcaggcgcaccggaagtactacatctgacatcggatacccttcatagaaatgtactcttccctgcattgcgactaccggaaccccttctacatatccgaaaagaaatcttccctgatgtcctgcaactgtggaaactgggaatccttcaatctcagaatactcaatcgactcctccacctgcatttcttttgcataatcaccaagacctgatccgagaatcagagccacctctggttgaaattttactttactttttactgcattgctgcaatttaacaatttttcataaatctgattcatacttctacctctctatcagttccgatacgactgcattcattttccggtactgttcactgtctatatagaacttacttccttttctcgtgatccatccattctcctcgaatttctttaccgccctgttgatcgtcttcacacagagcccggaagattccgaaagttcctgacgggtactgtccacatacaaaataccattttttgcatattttgtataagtttccacaagatagaatgccagccggtctgctccttgtaaaaataaaaatgcccgactgttcttgccctgttcaaacaggtaatgtcccatgatcttcgcttccagcttcagagcacggatatcggaattcagccagcgggcatatttttcttttgctatttttacgatagtgcaaggggtaaccgtctcaagtgttgtacaataacggtctagatccatgataacctccatcccgcccatcgcatagactccctcaaatctcataaagtcataagtgatcccatagattcggtaatctgtcgccttgatcattccacgaccaatgatatagatggtatcaaccggcgtgttctctttgacaaagaccacgccggcatccagttctacaatctgaaaagaatccatcagccacaccggtgcactgtaaaaatactcttcaaaccgctcccgtttctttttgtcaatctcattcagaaacggaagcacctgatataaatatttgcattccatatgcttatttgatcagctctacctttacgatctctgccggaacacctgttgcatcttctgcaacagtatcattttctactttgatagatccatcttttaattttccatacagttcatcgtatttttcctgtgtaaattttgtaaatttagaagtttccattggaagctgaattccgtcatcttttgcacttaagttcagagttgttccacctgcaaagtttccatcatagtagcttgcaactgcatcatatacagaatctccaagattcttcatagcagaagtgattactgtatcagactctactgactggtctacatcgacaccgattactacttttcctgctgtctctgctgctttcataacagagttaccaactccaccgccacatgcgaagatacattctgttccttcattgtaccatgctgctgcttttgcattgttttccggagaagcatcaaagtttcctacataagtgtatttcactgaaacatcacctgctgcaagacctaaatcttttgctgctgcatctgctccctgaacaaatccatatccgtaacggataaccgccggcactgcgattccacccataaatccaagatttctgtaaccttctgttactgctgcataacctgcaagatatcctgcctgctcttctgcatagaaaatagaaagtacattgtcttcgagttttgcttccccatcttttaccggctgtgcatcgatgatgatgaaagatacatccgggtattttgtctgtgcttcgtatacaggcacctcaaagaggaatcctggtgttgcaaccacttttgctccacctttgacagcaagatcgatcgcatttaaacatgcctcatcagatttttctgctggtttgtaatatttgtaagtgatatcatgctctttcgcatatttttccagaccttcccatgatccctggttgaaagatttatcatcgattgttcctacgtctgtgatcagcgccagctcataacctcccttggaatctttcttgtcaccgtcctttgcagtatcctctgcacccggtttttttactgcacatgcagccatgctcataaccatgactcctgctaagatcagacttaaaatcttctttttcataatatgttctccttttcttttttaatattcattcgtcttatgaccttgaatcaattttaccgcggaacttgttccgattctatcgcagccttcctgaagaaatgcttccagatcttctaccgtcttcactcctccggctgctttcatcttcacatgctcaccaatattttctttgaacagacgaatatccgaaatagtcgctcctgctgttccaaatccagtagaagttttgatgtaatctgcacctgccgctgttactgctttacacattgcaattttctcttcttctgtcagatagcatgtttcgatgatcacttttaagatcttatctccaacaacttccttcaatgccgcaatttctttttctaccgccgcataatcaccatttttcacatctgaaatattgatgaccatgtcgatctcagacgcaccgtcctccagcgccttctttgtctctgcgatcttcgcctctgtcacactgtaaccgagtggaaaacctacgaccgtacagatattgatctgttctccgtatgcctccttcactctctgaatgtagcatggcggaatgcataccgaagcagtctgatattccactgcctcatcgcacagtttcttaatgtcttcccatgtggcaaatgctttcagctgtgtgtgatccacatgtctcatgatttccttttctgtcatcacgttctcctttcttaatttttttatacacattgctatgcaaggcgttctacctgatccttggttactctcgcatatacaagcggagtctcgtttgctttctcatcttcaatcgtcacagctgcctgatatctcagttctgctgctgcaaataattcttccttatctgcatagaagactgccataggctctcctgcctccacgtaatctccaacttttttctttaagatgattcctgctgcaaaatcaatctggctgtcttttgtctcacggcctgcccccaacatagcagaggcaatcccacagctttctgtatccataaatgtaatgtatccgcttttctttgcgagtacttcatgttgatatgccgctttttcaaacttatctgtatcaaagatcacagagctgtctccgccttgtgcttccaccattgctgcaagtctttttaacgcctcaccatttgcgattacttcccgcacaagtgatctgcattcttccagcgttccttttcctgcaaggaaaagcatgttcgatgcaagatgtacacagacttctgtcagatcctccggaccatttccttttaatgtctctaccgcctcaatcacttccagactgtttccgatattatgtccaagtggaatatccatatctgtgatcagtgccacagtctttcttccagcattctctccgatcgctaccatttcttttgcaagtgcgatagaatcatcaatactcttcataaatgcaccacttccagtttttacatcaagaaggatacagtcatttcctgctgcaagtttcttactcatgatcgatactgcaatcagtggaatactgtccactgtcgctgttacatcccggagcgcgtacagttttttatctgccggagcgagatttcctgactgtccgatcacactcaatccggtctgattcactacgttgaaaaagtcttctctggaaagagatgtctgaagtcccggaatggattccagtttatccactgttccacctgtatgtccaagtcctcttccggacatttttgcaaccttcacaccgcaagccgcaacaatcggagcaatgatcatagttgtcttgtccccgacacctcctgtggaatgcttatccactttcacgccctcgattccggataaatctaccatctctccagaatgcgccacagcctgtgtcatcgcaagtgtctcttcctcggtcattcctttgaaataaaccgccatcaaaaacgctgacatctgataatccggaatttctcctgctacatactcgcggatcatatactgaatctcctgctctgtcagtgcttcaccatttcttttcttcatgatcagatcatacattctcatggtgtctgccactcctttctattatctgcttcccttatcgtatgggattccctctgctcttggagcctgagagttcttagatgaaaacgctaatacgatcaatgtcgcaatgtacggaatcatcttatatacttcgtttggaattggcaacgatttcaaaaatggaattgcagagtatgcacttgccaatgtcttcatgattccaaagaaaaatgctgccattaaaattttgttacttctccactgtccaaaaatcaacactgcaattgcaaggaaaccatatccggcaacacttgcattaaagtttgtagaagtcggaataacaaagatcaacccaccgattccagccagtacaccagagatgataaccccggcataacgaatcttcgccacatttacaccgacagaatctgctgctcccggatgctctccacaggcgcggagacgaagaccgaatcttgtatttttaatcacataagctgccacaagaaagattccgattccgatgtatgttgtaatataacaattctggaaaaacatatccccgatcaccggaatatctccaagtaccggaactttatcaatgtgaaatgtatctgtaaactgtatctgctgtaccccctggatcatacgcgctgtaaaaatcgcaaatgccggagcaaataagtttaatgcagtaccactgatcgtctggtctgctttcatattaatagaagcaaacgcatgaagcagagaaaacaatcctccggcaactgctacgatcaagattgccagcaataataatttctgtccactcattctgtcctggaaaatattgatgaagaaaattccaacaaaagctcccatgaccataataccttccattgcgatgttgatgacaccgcttcgctcagaatacattgccccgattgctacaataagaagcgggatcgcaaaatacatcgtctgttgaataacaaaatatactacactcattatttgccctccttcttattctttttcgcagattttctcatgcgaatcttgtagatcagatttttaaataacagcgacagtgctccacagtaaataatcgcagaaataataatatcgataacctccggcgcaaaatcaaatagctgcatgttgtaaccgccaactgtgatatgtccgataaacagtcccgcaaataagattccaattggattggaaagtccgagcagtgcaaccgaaattccagaaaatccttccggtgcgattacatcaagtacctgcatgtattttccggaatctgccaagtataacaatgctccgccaagccctgcgagcgcacctgcgatcaccattgaaagaacaatactcttttttgcattgattccggcatacttacttgcgttcggattttttccgcacgctttcaattcataaccaaatgtcgtcttattcaaaataatataaatcagaatgacacataaaattgcgatcagaataccgatattgatattggtacccgggaacaatttgtctaaccctgctttcggaaggtttgccccgtctgcaacggccatagtctggttctttacctgatcgtatactgttctctgaatcatcatatttacaagatacattccgatatagttcatcataattgaggagattacctcatttacattgaaaaatgctttcaacaagcccggtaccaatccccagatggctccggcaaggattgctgcaagaagcgctgcaagacaatgcagtcccggtggaagaaatgtaaacttcacgccgacaaatactgctgcaaaagctcctgcggtaaactgtccggatgctccaatgttaaaaagtcctgtcttaaatgcaaatccgacagaaagtcctgtcataatgatcggggttgccagataaagcatctgcccaatcccctgaattccgtctgtaaatcctccctgaaggatcatcataaatccatagtatgcctgctgcggattgctggacagcagaataataaatccaaataataatccacagacaatcgccagaatggaagaactaaaattgacgattccgtctccgcgccagatatttttccatttatttttcattcttcacactccttttcgcacccgccatataaagaccaagttcctctaccgtaatttcctttggattgacatctgcaacaatctcaccttcatacattacgatgatacggtcgctgatatccattacttcatccaattccagtgacactaacagcactgcttttccttcatttctctgctccacaagctgtttgtgaatatattcaatcgcaccaacatccagaccacgtaccggctgcactgcaataacgatctctggatctctgtcaagctctcttgcgatgattgctttctgctgatttcctccagacattccccggacaatgctgtcttctccctgaccggaacggatatcaaatttctcgatcagtccttttgcatatttccgaattgcatcaaattttaaaaaaccatgtttctgaaaccgttccgtgtagtaactctgcaatacaaggttttcctgaagcgaaaagtcaagcaccagaccatctttatgtctgtcttccggaatatgagccattccatccagacacttacgccggatgctctcttttgtgatgtcttttccgtttaaaataatctgtcctttttcaatcggagtcaatcctgtaattccatatactaactcggattgtccatttccatcaatccccgcaacacagagaatctctcccttacgcaccgcaaaagacacatcttttactgcatgctgcccttcatgcttggaggcaatggtcagattctttacttccaataccggctctcccggcgttttctccggcttgtccacatggaaattaacttttcgtcctaccatcatctctgacattgcttcctttgaagtctctgccacatcgatcgtgccgatatattttccttttcttagtacactgcaccggtttgccacttccttgatctcattcagcttatgcgtaatgaatataatggattttccttctgccacaagctgtttcatcactttcatcagctcatggatctcctgcggtgtcaataccgctgtcggctcatcaaagatcaaaatatcattatcacagtaaagcatctttaaaatctccactctctgctgcattccaactgtaatgtcagagatataggcatctggatcgatcttaaatttatacttttcactaagctccatcactttttttcttgcggcatccatctttaatgtgccaaattttgtagtctctcttccaaggacaatactttcaaggactgtaaaattgtgcaccaatttaaaatgctgatgtaccattccgattccaagatcgttggcatcatttggattattgatcttaactgccttcccattgatcttgatttctccctcttccggctggtacaggccgaaaagaacgctcatcagtgtggattttcccgccccgttctcacctaacagtgcatggatttctcccttttttacttgcagggtgatatcgtcattcgctttaaaattcccgaactgtttggtgatatggttcatctcgattacatactccacgctcctacctccgtttcttttttctttctcctactgtttccctgttactattttataataagttccttcatgctcgttccgtctgtattattttccacatgaagaagatccaatactgttgcagcaatgtccgcaaatgtctctcttgtcccaagatttacattttctttgatatcttccccgcagatcaaaagcggtgtatgctctctggagtggtctgttcctctaaatcccggatcacatccatggtctgctgtgatcatcagaatatcctcaggtctcatgcgctccaggaatgtttttaactgtctgtcaaatactgttgcagcatttgcatatccctcaatatcattgcggtggccatacatcatatcaaaatcaacaagatttacaaaacagagtcctttaaagtccttctcctgcatctcaagtgtcttctccatgccgtccacattattctggattctctgtgtgtgtgcaatccccttgcctgcgaaaatatcataaatttttccgattccgtaagtgtcatatcctgcctctaagattgcatcaagcattgtatctctcggcggaagaagtgagaaatcatgacggtttgcagttcgctgaaagttcggcgcttctccgataaacggacgtgcgatcacacgccctaccccatgctcaccacataagatttcccttgcgatctcacagtatctataaagttcctctacaggaacaatctcttcatgcgcagcaatctggaatacactgtctgcggatgtgtagacaatcaaagctcctgttttcatatgctcctcgccatagtcccgaatgacatcggttcctgaatatggcagattacaaagcacttctcttccggttgcctcccggaacttctctaaaatctcttctggaaatccattcggatataccggaagtggttttggagatacaactccggcaatctcccagtgtccgatcgtcgtatcttttccccgagagcgctctttcatccttccatacgctccagcaggactctcttcctttttcatccagtccacaccatcaatgttaaacaagccgagtttcttcatattcggtgtatcataggctttggaagctgtaatcgtctttaatgtattgcttccttcatccccgaaatctgctgcatccggcagtgctccgatcccataactatccagtacgattaaaaaaattctcctattttccattctttttccgtccttatttgttgatatttaataactctttttgtatcatatcgaaataatattagctcgaaaaggactaaagtcctttttcgttctacttattttaagtttgtcattttttcgctaatttgtctactgttttttgtaaaaaattcataagtttttccaactgctttttcgttattctgcatagaacttttgttttcttccatgagaatccatccgaaataaatattttacatttatttgtggaaatctaacgatatctgttatataatttactattgtatacaagatattcatttagtttctgcagcgcaattctataagggatagattgcggcagatctttttgaatacacctatttcaaacagatacgatagcttataatacagatcacatagttttgtaggaggaatattatgaaagatacaaagatttcagattctgttatttacattggtgcagatgataaaacattagacctttttgaaagtcagtatgtcattccgaatggtgtttcatacaattcttatctgattttggatgagaaagttaccgttatggatactgtggatgcacgcgcgacagacgaatggcttcaaaatcttgacaccgccctcgatggaaaaaaagtagattaccttgttgtttcccacatggaaccggaccatgcagccaacgttgcaactctgattgaaaaattcccagaactccaggtaatcgggaatgcaaagaccttcaatatgatcgctcaattttttgatttagatctctctagccgttccattattgtgaaagaaggagacacgatttctcttggtacccacacattacaattttttatggcaccgatggttcactggccggaagtcatggttacttatgagcagagtgagaaaattctcttctccgcagatggatttggaaaatttggggcgctggacacagaggaagactgggctgaggaagcaagacgctattatctaaatattgtcggaaaatatggcatgcaggtacaggcgctcttaaagaaagcttctgcacttgacattcagatgatctgcccgcttcacggaccgattttaaaagaaaacttaggatattacattgaaaaatataacacttggagtagctatgagcctgaggaggatggtgttttgatcgcctatgcttctatccatggcaatacaagaaaagcagcggaattattaaaaaaagatctggaagaaaaaggtgcgaaaaatgttgtcctgactgatctttctcgtgatgatatgtccaaagcactggcagatgcattccgtttcactaaacttgttgtcgcatgtgcgacttatgatggtggactgttcccatgtatggaggatttcttacatcacctcaaggcaaagaactaccagaaacgtactgttgctctgattgaaaatggttcttgggctccaatggccgcaaaacagatgaaagcattctttgagacattgaaaaatatctccatttgtgagaacgttattactgtaaaatcaactgtaaaaccagaaacaaaggttgctcttgcatcacttgcggataccttgcttgcataaatccaatttttacttttataaaaatgcgtcatgaaatgattcacttatcatttcatgacgcattttttatgcactatatttttctttcttttccccgagatgaagccagtccactctccacatatagatgatcacacccagtgcggctgcactccatgagaccgggtatccccacagaacagtggaaagcttcggaatgatcgaagtcataattcctacccaaagcattcggattcctaccatacttcccaccatcagaagcattgcggccatagaccgcccggcacctctcaaaactcctgtatacacctgtgcgattgcaagtaaaaagtaaaatggcatcaccgtcttcaacatcagatgcccgtttgcatttacctgcggatctgaagagaatatcgttaaaagctgtttcccaaatatcagtaaaaccgaacatgctaaaatagagtaaatctcactgatcaatagcgttcgatgctgacctttctttacccgatcaaatttccctgctccgatattctgtcccgtaaatgtcattgcagccataccaaaactcatgatcggcaaaattacaaatccgtcaatcttcatataagagcttgttcccgccatcgcatttgccccaaaactattaatattggactgtacgatcacattggaaaaagaaatgattgccgactgtagcccacttggaatccccattgccaggattctcttcatcattctcacatctatccgaagttttctaaaatacatacggtaaatatcatcatccctgcacaaggtccagacaacaagtactgacgaaataacctgtgaaataaccgtggcaatcgctgtcccttttacgcccatccttaaaactacaacaaacaaaatatccagcaaaatattgaccgctgacgtaatgcagagataatagagtggacgcttagaatctccgacacctcttaaaatccctgcccccatgttgtatgtaatattaaaaagagaacccataaaataaattctaagataaattacagattgttccattacttccggaggagttcccatcgcctttagaatctgcggcgataaaaatactccgataaatgtcaggagaacccctccgataatgctgagcatcatcgatgtgtgaactgcccattgcattttttctttatcttttgccccataatattgtgcaatgatcacacctgctcccgtagatatgccaataaataacccaatgatcaaattgatcaaggaattacttgatcctaccgctgccagcgcttctttcccaataaagtttcccgcaatgacggaatctgctgtattatacagttgctggaacaagtttccaattaaaagtggaatcgaaaatagcataatacttttaataatacttccttctgtcatcgttaattttttctctctttttctcttctccatactttcacctttactattgtttatgtttattctcaaaagctgttcgctcaaagaaagaaaccagcaaactgccggtttcctcttaaattttgtaaaattctttttatgtattctttttcacttctactttgaatggaactgttctatctatcccattactcctttatacagcaatattattcttcctgctgttctttatacaaagctgccagatattctacaattttttcttttcccagaagactgctgttcataagaatctgatgagactgaatgctgccccattcctttccggaataggtctcatagtaatactttctctctcgatcaattttcttcatcttttccgctgcttttctttctgataaatgatacttgtccatgacacggtttttccggtcttctttggaagcacaaataaatacattaatacatcccggataatcctttaacacataatctgcacatcttccaacaatcacacaggatcccttctgtgcaagcttcttgataatcgcagactgtaccgcatagagatctcttccaacaggtgcataaaactcagcgtttgccataaaatcgttatatccgcccattgccagattgtagttcgatacaatactcatcaattttttctcgtcttccagttccgcctgctcttctgtaatatggagctcttctgccgccattttcacaagatttctgtcataaaatggaattcccagtttctttgcaagcagttctccaatctcatgacctccgcttccaaactgtctgccaattgtaataatcgtgttcttcgtcataaaaatcaccgccttttaatgactgattaattatctgattcttgtatctattatactatatttgttgtattttttccatatattttttatttttgtctatttctaatgctataatctaaatcttctgtttcattcaaacatcagcatataaaagaccccttatcgatacttcaataaggggtttaagcgtgggcgagaagattcgaactcccgaccttttggtccgtagccaaacgctctatccagctgagctacgcccacacaatatttaattattacaccttttggtgtaatgccggcgaccggaatcgaaccggtacgggagtataagtcccgcaggattttaagtcctgtgcgtctgcctgttccgccacgccggcatttcagcagttatctgctaagtgggaccaatagggctcgaacctatgaccctctgcttgtaaggcagatgctctcccagctgagctatgatcccatgggatatgaaattatgtatcttttgatacaagcgacccggaagggactcgaaccctcgacctccgccgtgacagggcggcgctctaaccaactgagccaccgggccatatgaaattatcttaaagtggaccttcagggactcgaacccgggaccgatcggttatgagccgattgctctgaccaactgagctaaaggtccaaaacattttgtctttacctaaaagaccgcttactatttgcataagcaaaagccgacaatcggacttgaaccgataacctgctgattacaaatcagctgctctgccaattgagccatgtcggcatattcttttgtcttacagctattattaactgtgaatgactcctacgggaatcgaacccgtgttaccgccgtgaaagggcgatgtcttaaccgcttgaccaaggagccttattcgtcttttcacttttagaaataatcatttctaaactccccaagttggactcgaaccaacgacaactcggttaacagccgagtgctctaccgactgagctattgaggattaacctgaagatattataccttcaaaatcacatacagtcaactacttttctaagttttttctctttccatccattctcctatcaccacttggttatgccctcgaccgattagtaacagtcagctccatacattactgcacttccacctctgtcctatctacctcgtcgtcttcaaggggtcttacaactcgcgttgggatatctcatcttgaggggggcttcacgcttagatgccttcagcgtttatcccgtcccggcttggctactctgccatgcacttggcagtgcaacagatacaccagcggccagtccaccccggtcctctcgtactaagggcagctcctctcaaatatcctacgcccacgccggatagggaccgaactgtctcacgacgttctgaacccagctcgcgtaccgctttaatgggcgaacagcccaacccttgggacctacttcagccccaggatgcgatgagccgacatcgaggtgccaaaccactccgtcgatgtgaactcttgggagtgataagcctgttatccccagggtagcttttatccgttgagcgatggcaatcccactttataccaccggatcactaagtcctactttcgtacctgctccacccgtcggtgtcgcagtcaagctcccttctgcctttgcactctttgaatggtttccgaccattctgagggaacctttgagcgcctccgataccctttcggaggcgaccgccccagtcaaactccccacctgacattgtcccccagccgggtcacggctgctggttagaaacccagtactgcaagggtggtatcccaacagcgactctgtatctactggcgtaaatacttctcagtctcccacctatcctgtacatgcaataccgaatcccagtatcaagctggagtaaagctccatggggtctttccgtcctggcgcaggtaaccagcatcttcactggtatttcaatttcaccgggtgcattgtcgagacagtgcccaaatcattacgcctttcgtgcgggtcggaacttacccgacaaggaatttcgctaccttaggaccgttatagttacggccgccgtttactggggcttaagttcaaagcttcgcttacgctaacctctccccttaaccttccagcaccgggcaggcgtcagcccatatacttcacctttcggttttgcatagacctgtgtttttgctaaacagttgcttgggccaattctctgcggccagttctcactggcactccttctcccgaagttacggagtcattttgccgagttccttaacaatgcttctcccgtcggccttaggattctctcctcatccacctgtgtcggtttacggtacgggtatgatataaacaatagcggcttttcttgacgcatggctcacgggcttccctactctcagttcggtccgcatcacgtcttcagattgagaagcggatttgccaactcctctcctacctcgcttgcaccgggctttccattcccggctcccgctctccacacgtgtccccacagttctgttatatcatagtacaggaatttcaacctgttgtccatcgactacgtctttcgacctcgccttaggccccgacttacccagagcagatcagctttactctggaaaccttagatattcggccggaaggattcccaccttcctctcgctactcattccggcattctctcttcttaaaagtccactgctccttccggtacagcttcttccctttaagaatgctcctctaccaattgatcagatcaattccacagcttcggtagtgtgtttcagccccggacattttcggcgcaggacctctcgactagtgagctattacgcactctttgaatgtatggctgcttctgagccaacatcctagttgtcttcgaaatcccacatccttttccacttaacacacattttgggaccttagctggtggtctgggctctttccctttcgactatccaacttatctcgtatagtctgactcccatacatcatctacgcggcattcggagtttgatattcttcggtaagctttgacgccccctaggaaattcagtgctctacctccgcaagactcgtatgaggctagccctaaagctatttcgaggagaaccagctatctccgggttcgattggaatttctcccctatccacacctcatccccacccttttcaacggatgtgggttcggtcctccattgccttttacggcaacttcaacctggacatggatagatcacccggtttcgggtctactctgactgacttcacgccctattcagacttggtttcccttcggctccagaccttcagtccttaacctcgccagccagcgtaactcgccggaccgttctacaaaaagtacgcggttcatcatataaagatgttccacagcttgtaaacatatggtttcaggttctctttcactcccctcccggggtccttttcacctttccttcacagtactatgcgctatcggtcactaaggagtatttagccttacggggtggtccccgctcattcccacaaggtttctcgtgtctcgtggtactctggatcctgccgtgctcgctcgcctttcatgtacggggctttcaccctctctggctggctttcccaaaaccattctactaggctcactcatcacttacgcagtccgaaccccggaatgcacgcatcccggtttgggctcttccgctttcgctcgccgctactcacagaatcgatgtttctttctcttcctccggctacttagatgtttcagttcaccgggttcccttcttaacgttatgtattggcgttaagatgacggaggtttgctccgccgggtttccccattcagatatctccggatcattggatatttgctcctccccgaagcttttcgcagcttatcacgtctttcatcggctcttagtgccaaggcatccaccatacgctctttctagcataaccaacttgcttcgtccacgggtatggactccgctacacatatctagcgtgatatgcgttggcaatagtttgttgtttttattcgttttctcgaatcagttctcatttctgctcttgcaagcttccatgatcacctcggatgtcttgatatttttcttatcatttcatttctgtatgcgattttcaaggtacacattagattcctttttggaatccaatggagataacgagattcgaactcgtgacctcctgcttgcaaggcaggcgctctcccaactgagctatacccccaaataggttttattcaatttagcttgacattcgtttcaagctatgggcttaagtggactcgaaccaccgacctcacgcttatcaggcgtgcgctctaaccggctgagctataagcccttagttgtaatctggcagccacctgctctcccacaccgtctccagtgcagtaccatcggccgctgaggtcttaaccatcgtgttcgggatgggtacgggtgtttcccctcagcgcatcgccaccagaagcttttcgttcttttcagaacactcataactaaacaatagacttcttcaatccttacttctttcttccttagaaaggaggtgatccagccgcaccttccgatacggctaccttgttacgacttcaccccagttatcggtcccaccttcggcagctccctccttgcggttgggtcactgacttcgggcgttactgactcccatggtgtgacgggcggtgtgtacaagacccgggaacgtattcaccgcgacattctgattcgcgattactagcgattccagcttcatgtagtcgagttgcagactacaatccgaactgagacgttatttttgggatttgctcggcctcacgactctgcttccctttgtttacgccattgtagcacgtgtgtagccctgctcataaggggcatgatgatttgacgtcatccccaccttcctccaggttatccctggcagtctctccagagtgcccggccttaccgctggctactgaagataggggttgcgctcgttgcgggacttaacccaacatctcacgacacgagctgacgacaaccatgcaccacctgtctcctctgtcccgaaggaaagctccgattaaagagcggtcagagggatgtcaagagcaggtaaggttcttcgcgttgcttcgaattaaaccacatgctccaccgcttgtgcgggtccccgtcaattcctttgagtttcattcttgcgaacgtactccccaggtggactacttattgcgttggctgcggcaccgaagagctttgctccccgacacctagtagtcatcgtttacggcgtggactaccagggtatctaatcctgtttgctccccacgctttcgagcctcaacgtcagtcatcgtccagcaagccgccttcgccactggtgttcctcctaatatctacgcatttcaccgctacactaggaattccgcttgcctctccgacactctagctgcacagtttccaaagcagtcccggggttgagccccgggctttcacttcagacttgcactgccgtctacgctccctttacacccagtaaatccggataacgcttgccccctacgtattaccgcggctgctggcacgtagttagccggggcttcttagtcaggtaccgtcattttcttccctgctgatagaagtttacataccgaaatacttcatccttcacgcggcgtcgctgcatcagggtttcccccattgtgcaatattccccactgctgcctcccgtaggagtttgggccgtgtctcagtcccaatgtggccgttcaccctctcaggccggctactgatcgtcgccttggtgggccattaccccaccaactagctaatcagacgcgggtccatctcataccaccggagtttttcacactcgatcatgcgatcacgtgtgcttatgcggtattagcagtcatttctaactgttatccccctgtatgaggcaggttacccacgcgttactcacccgtccgccactcagtcacttgagcttccttccgaagaattccattcaagcgcttcgttcgacttgcatgtgttaagcacgccgccagcgttcatcctgagccaggatcaaactctcgttaaaagtgtttgtttccagtcaagaatcactactagcaatcctatcccttttactgtttttaggttgacatttctgtctgttctgaaattttctcatttgttcgaaattttcaggattgtgttgtctattgtttaattatcaatgttccgttttgcttttcgtaatcagctgttttattttatcacagcgtttcttacttgtcaagcacttttttatttttatttttcgttgtttttgtttcgcaacaacgatttatatattatcacaagtcctttttgcttgtcaagtacttttttatttttctttttcaaactttttttgaacttgtctgctctctcgagcgctccattagaatatcatcttcgacagaaactgtcaataggttttttcatttttttctatttttttgtaattttatacttttccgacgttttttcacttcatgttacaggcagcctttgagattgttcttccgtcagactgcctgtgtcctaggtgaaagaaatgaccttttgaattgcatatatctcttttcttttttctataagagctgtattgcttcattaacactctttacgccaatcactcggattccctttatacttttcaccattttcacagaagcctccggcaaaatgcaagtggtgaatccaagtttcttcgcttctgccactctctgttccggcatatttactgcacgcacttcaccgcttaatccaacttctccaaatacgatcgtcttttcatcaagcggtcggtttttataactggatacgattgccaggacaattcccagatctaccgccggttcattcatcttaattcctccggcaatatttacataagcatcatggtttgaaagtggaaatcctattcttttttcaagaactgccatcaaaagattgacgcggttataatccgtccccgcagctgtgcgccttggcatcccaaaatttgtcggacagacaagtgcctgtatttcaatcaaaatcggtctcgttccttccatggagcatgccaccacagatcccgaagcattctccggtcttccttccagcatatattctgatggattttctacctctttgagtccatcctgcctcatttcaaagacgccaatctcattcgtagatccgaaccgattctttaccgctcgcagaatccggtaggacgcgtgtcgatccccctcaaaatataaaacggtatccaccatatgttccagcactctcggacctgcaactgttccttcttttgtcacatgacctacaataaaaatcgaaattccaagccccttcgcaagttgcatgaaaacattcgtagattcccgtacttgagatacacttcccggtgcagatcccacagcttcgctgtacattgtctgaatagagtcaatgatcacgatctctggtctgcgtgactctaacacaccttgaatcttctctagattcgtctcactcagcaaaaagaccgtctcactaaattctcccatccgctttgcacgcagttttatctgcctgagtgactcttcccctgaaatataaagaatcttcctctgatccccaccgagttcccgacaaacttgcagcaaaagtgttgatttgccgattcctggatctcctcctaccagaatcagcgatcccggtacgatccctcctccaagtacacgatccaattctccgatttttgtatagatcctttcttcatgctctgtctccacatcattcaaagataaaatttccacttcttttaccgatgcaaggacagattttgtatttccggaagcagtgatcttttcctctacaaacgtattccattctctgcacaccgggcattgtccgagccatttattttcttcatgcccacaattttggcagaaaaatatactcttttttgattttgccatattcgttttcctttttttgttttctttatatgaaatgaaacaaggagccctgcctcaagacactgtctcattttgcatcggttccttgtttcttgatttgtaatctctttatgtaacttacaccctcattacaagtatgctcttctttaaactcttgccactctgatctttgcgttgacgccttcctgaagttctgcgctgacactcagtttcccgctcagatttgtcatcatttttccgatattgacgtcgtccacatacacaatgtattcacagtctggttccagttctaatgtaaactgtgcatcttccttcgcagatactgtaaatgccacttcatcttctgtttctgcgaaatgttcaacagcagtccccggtacagattcatagacgaacattccatttctctctagttttgtgatctctgagaaggtctttactttatatacatctccttcgaattcaaagttatccaattttgtcttctgtgctaatgtaaaatccccaaaactaagtgttccgtcttcctctacacgcaataattcttttactgcagccatcttgttctcctcctacggtacttcatattttcatttctgcatcttatcccctctcatcatagtgtggataaggtgttttctgatattatataataatttgtgatatttttctagttctttgtcactttcggcagaaatttaatttgttttttagaaaaggatacatctacctccatatcggagtggatttctccggcaagaatcgcctctgccatcttatcttccaattcattctgcactgcacgtctcagcggccttgctccatatttagtatctgttcccacttccacaatatgttttttgactgaatcacggatgtgtaactggatatttaactgtgactggacacgaactgcaaattccttgcacaataatcctgcaattttcttcaaattctctgcactaagcgcatggaacacaataatttcatcgatccggttcaagaattccggtcggaacaactgcttcacttcatccattacattgcttttcatcttcttatagtcatcctgcggatcttcctttgcagcaaatcccagcttcttcggttccacgattgccttcgcccctgcattcgacgtcataataatgaccgtattacggaaatcgatctttcttccctgggaatctgtaatatgcccatcatcaagtacctgaagcaaaatattaaatacatccggatgtgctttttcaatctcatcgaacaaaattactgcatatggattccttctgactttctcgctgagctgcccgccttcctcatgtccgacatatcccggaggggaaccaatcatctttgacacactatgcttctccatgtattctgacatatcgacgcgaatcattgcatcttcctgtccaaacaacgcctccgcaagtgctttggatagctctgtcttccccacacctgtcggtccaagaaacaaaaatgacccaatcggtctgttcggggatttcagtcctacacgtccccgcttcaccgctttcgcaacagcagtgaccgcttcttcctgaccgatgactctcttctgtaaagtctgctctaattttcttaaccttgcactttcagattctcccagtttttgtaccggaatctttgtccagacagacactacttctgcaatctgctgctctgtcacgcaaatctgatgcgatgcctgattcttgtcaaaccgtttcttaatgctctctaatttcttttcaacagcctgctgctcctgattcaacatcgatgcctctgcaaaacggccttctgccaccgcctgttccttctccttcatgagagactgcagaatttcctctgtctttgtcagattgtccggaactttaaacccattaagatttgccttggaacacgcttcatccaaaacatcaatcgccttatcgggcagattcctgtcactgatatagcgctctgacagtttgaccgcagcctcaagtgctcccggctcaatcgtaacatgatggtgtgattcatattttcccttcagaccttccaaaatctgaatactctgggcactatccggctcttcaactgtaatcggctgaaatctccgctccaacgctgcatctttctcaatatattttctatattcagagatcgttgttgcgccgatcaactgcagttctccacgagccagcgatggcttcaaaatgttagaggcatccatagccccctctgcacctcctgcaccgatcattgtatgtacctcgtctaagaacagaagaatatccgatgaacttttcacttcctgaatcaggcgcttcatcctgtcttcaaattctccccgatacttagatcccgcaatgagagcagcaagatccaacgtcagaatatgcttatgcttcatactctctggaaccatccccgacacgattctctgtgcaagcccttcaatgatcgcagtctttccaactcccggttccccgacaagacatggattgttcttcgttctgcggcttaatacctgcatcagccgctcaatctcttccgttcttccaacaaccggatccagcttcccgtctgctgctttctctgtcagatctgtgcagtattgctccagcatccctggctgtcctcttcttccacttccggcttcctctgaaaattccgccggatcaatccctgccgcctcaaaaatatcttgataaatctttgtcagactgatatttaacgttgtaaggattctggccgcaacacactctgaatcacgcacgatcgccatcaacatatgctccgtaccaacctccgatgcctgaaatcgctctgcctctcttctgctgttcttaagaagatactctaagcgtggacttctctctgcctttccttcaaatacaacttcctctgtcggagaaatcagttctccgatcactttcaaaatctcattctcatttactccgtttgccgcaaggatctgacctgccactcccgtaaacactctccgcagtccaagcaaaagatgttctgtcccaatatatgggtgtcttaactcctttgccgcactcctcgcggtctttaacacattctcagcctgttttgtatatccaatctgcatgaattcctccttctatctctcctacacatattcttcataaatctcatccacaagctgatgaacttcctccctggaaatgttctgacagcttgcctttgcaagcagtactctgagctgctctctcatctcttccaccgcctgaagtttattgacatcgatggcgatcacagcaccttttctgcggtccagctgaagaaacccttcctgctttaagaccgaatacgccttatttactgtatgcatattgataccgatattttccgcaagctgcctgacagacggaagtgtatccccttcccggatcgtagatgtcgcaattcccataatgatctgattccgaagctgaatatacagcgcttctgaactgttaaaatcaatctcgataaacataacctcacctccgttgttatatacatgttataacatatgacatttcttgtcaatgcattctcttgccctttacactccttttaatttcagatataatagcaacgtaaataagaaaataaaacaagatggaggaacactgtgaaaatacgtagattatttgccatatgggcttcaaagctcacaggctttgtatgtaaattgttaggaaagcaggggctcacctggtctggtaagattgcacttacgatcgatcctgatattctgacagagatggccgctgatgtccgtgagaaaatatttgtcgtttgtggtacaaatggaaaaaccacaatcaataatcttctctgctctactttggagggacagggaaaaaaggtaatctgtaaccactccggttccaatatgttaaacggagctattgccgcttttgtactatctgcaaaatggaatggaaaaatcgatgccgactatgcctgtatcgaagtggacgaagcctccacactgcgcattttcccgcatttcaaaccagattacatgatactgaacaatctgtttcgggatcagctggatcgctatggcgagattgatatcacaatgaatctgttaaaagatgcaatgcgaattgctccggagatgacgatcatcgtcaatggagatgatgcactctccacatatcttgcccaggaaagcggcaatccatatgtcacttacggaattcaggagcaagtatttgaagaacaaagcatcaacgagatcaaagaaggacgtttctgcaaaaaatgtggagcaaaattgttttacaatttctaccactacagccagctcggggactatcactgtccaaactgtgatttccaccgaccagagctaaactataacgcaagcaatgtcaagactggaaaggttctggacttcgatgcaaatggggagcatattcatgtaaattatcgtggtttctacaatgtctacaatattcttgctgtatatgctgctgtcaaagaagccggtattccacttcaaaatttcaatgagatcctcggcaagtacaacccagaaaacggacgaatggaacatttctctatcaaaggaacggaaattatcttaaaccttgcaaagaacccagcaggatttaaccaaaacatttccgccgtcatggaggatgacagcccgaaagatctgattattctgatcaacgacaatgatcaggacggaattgatgtgtcctggctctgggatgtggactttgaccgcctaggcgacccatccatacgttccatcaccgtcagcggaatccgctgtcaggatatgcgcttacgattgaaatatgtagatatcccttctattttggagccggatattgagactgcagtccggaaacgcatcgccgatggcaccggaaatttatacgtccttgtcaattatactgccttgtatagtactcataatatcttaaagcgaatggagggtgaacaatcatgaaactgactatcggacatctttatccagatcttctgaatctctacggagaccggggaaatattcaatgtatgatgaagcggctccaatggagaggcatcgaagcagagacaattgaatttgagattcaggatgaggtcgacttctctgaactggacatcgttctgctcggtggagggtctgaccgggaacagatgcttgtctgcgaacgtctgaaggaaatccgcgatgatttcaaagcttatgtggaggacggcggtgttgtccttgcagtctgcggcggataccagttactcgggacccactattccactgatcaaggtgtgatcgaagggctttccatcgtagatatttacacagaacagggcaaggattatcgactcattgataacattgttctggagagcgaactttctgatatgcctgtggtcggctttgaaaatcacggcggcagaacttatatcaaagatcagaagccattcggaaaagtcatttatggaagtggaaatgacggacagagcggctacgaagggatcatttataaaaatgtgatcggaacttatctgcacggaccgcttctcccaaaaaatcctcagatttgtgatcatcttctctcaaaagcacttgagagaaaatataagaagtcaatcgagctcgctcctcttgatgacaccgaagaacgtgaagcaaatacttacatttatcagcgattcaaaggaaaagtcagcagaccgcaggatcaggaacagatttaagattttacttcaaaaaaagttgccgtattttttctttacggcaacttcttatcgttatttctcttttttagctttatggaatttcatagatgatccgcttgtagtttagcttttcttcttcggtctttgcatgctcgctgtcccagacattctgaaaggaaagatctttatcgtttgtcagtacaacatagcggactggcttcactgcctgatccatacgtccctccaaatccagcaaatatttatattcataatcatgcacctcatgatcttttgacaaaatcacccggaagttcttcccatcatagaatagatcttcgagaaaccattctttctcccttccaaactgatacatgatccgcacttttgcaggctctttgctctctgcacttcttaaaaactgttcccagtattctccgccgtcaaccagctttgtatctctgtaaactacacatccatctctctttgcctgttcggcagtataatcttccggaacatgatcaaatccttgatagaccccttttcctcttgtccgaaacgtctgcttctccttcggcatcagttccatgcacccactcatatacaaactgattcctattgcgatcagcccaaacaggattcttttctttttcatctgatttctttctccatatatacttcgccattaaggtctttccactcaaatttctcatctaaaatcatatagctgtgaagagaatcttcttttggaatggaaatagaacccgggttcatataaatacatctgtccgtttctctgcaaaccggcacatgtgtatgtccatgaagaagaatgtctcccttttttaacattggcacatgttccagattatgtacatgtccatgtgtggcaaagatcatacggtcattcaaatataaaatacagtaatctgccataatcgggaattccaaaaccatctggtctacttcactctcacaatttcccttcacacaaagaatctcttctttgatctcatttaacatcgcgatcacttcctttggcgcatagtccttcggaaggtcgtttcttgggccgtgatataaaatatctccgagaagcagaagcttatctgccttctctcttctgtatgcttctatcatctttctgcagtaatatgcagaaccgtggatatctgatgcaatcatccatctcattgttgctcctcctctgtttcactgtgaatttgctgtcattgtaccatctttcattttctttggataggcaaaaataaaaatttataaaaatgtggcaaaaacagatgcaccaatgaccgtcatcagccctgacacagcgatagaaaggctgctcatggctccctgcacctctccaagttccaatgcttttgctgtgccgactgcatgcgaagccgttccaagagaaagtcctaccgcaatcggttctctgattccaaacattttacatatatattctccgatgatatttcctaacacccctgtcacaatgatgacagcgacggtgatcgttgagattcctcccaactcctcggaaactccaattccaatcgcagttgtgatcgacttcggcagcagtgtcacatactgttcatggctcagcccaaacaaatatgccaacccgaaaacacttccgaggcttgacagtacgcctgccgtaattccccagaaaactgcccagaaattttgtttcaacaattccatctgctgatacaatggaaccgcaaggcagacagtagccggagtcaaaagatagcttaagtattttgctgattcgttgtaagtagcataatcaacatccaatacattgagtacaacaataactgcaacgatcgctaacagcaatggattcaaaaacccccatttcaattttttccgtgcaagtaagcccagaccataggctccgatactgatcgtcagaccaaaatacaacgattcactaaaaaactctttcatctttccgttttccttccttttctctcctgtagtcaataattccctgtgatacttttccggtgcaaatcatcacaaaaatcgttgtgataacaataatcatcatgaccggcacaacgatttcctttaaatccgcccacactgtaataagtccaactgccgaaggtataaacatcggcggcataatatcaatcaaaaaatccgctgcaagtttcacctgattcaattttatcactttcgcgcaaagacaaaatagcatgatcaaaagtccataaatgcttgccggaaccggaagagggagcactgcatgaagaacttcccctagaaatgtgaccgtcatgatcacgccaaactgatacaataatttcatatcttttctcattccttccctaaacgattacaaaattctttgcttttcatcatatcacactccattttgctgcgcacaatgatttttccacaaaaaaagcagaggatatctcctccattttgtagatatcctctgccttttgtagatatgctttattttttttcaatctgcaacatattatgtacaattcgcacaaatgtcacagttcctttccacatcacatcttcatcaatattaaatgttggattgtgatgtggaatatctgttccctttttttcattggaagaactcaggaagaaaaaagctcccggaacttccaaaagatagttcgcaaaatcttctcctcccatattaggaattgaaaaatcctcaataatatctttcggttcaaacagatcgctgacggcttttgcagccagctctgccatcgtctcatcattgactaccgggggagctccccatataatctcacactcacagcttcctccaaacatcgctgaaatagccactgccagtcctttaatccttctcgcaatatactggcgcactgtctcatccagcgctcgaatcgtcccttccaaaactacctggtccggtatcacattatattgggttcctcctgtaatttttccaacggtgataacactagacgctgttcccgatatttctcttgtctgtattgtctgcaaagcaatcagaagatgagctgctatgttgacagggtcaacgcccttctccggtgtagatccatgacaggattgcccttttacacaaataataaatttatcaaaagatgccatacaacatgcccttggaaaaataagagtccctgtcggaatttctttacctaaaatatttccgatatgaagtccaaaaatagcagctacatctttcagacatccatttgaaattgcaatctctgagcctctggaaatttcctcagctgtctgaaaaatcaatcttacatttccatgcattccatctcgttcttcctgaagtatttttgctgccccaagcaaaatcgccatatgcgcatcatgtccacaggcatgcatgcacccctcatgccttgaccgataagaaaccgcattttgctcctgaagcggcagcgcatccatatcagctcgcagggcaaccgtctttccttcatatcttcctcggatttcagcaatgatcccactatctttttctgaacaccaataaggaattcccattttttttaattcttcacaaacatacttttgtgtctttggaagatgtgtcccaagttctgggatctgatgtagatttcttctaacctttacaagatatttttgaatcatctcgtattctcgatccactttccagtcattcctttctgtatacactctgtctctattcgtgaatcaatgcatgctgtccgtccttcggagcctctgtcaacatttcaagcgcttcctctaccagttcttttcggaaaccttcttcctgcttctttggaagggatggatttccaaatacatgcaatacactgtttccacgcaaaattcgatgtgcaccaataccttctgaaatttttgtcagatttgttacatgcacaatcggaatccccgctctctcaatttcttttaccatcactgcaccgcagcgagagctagtacctcatgtagaagtcagaataaccgcatctacttcatttttcttcaagtcctctgcgattccttccccaaatttctttccaacttccataggagtcattacccctgccgttgtataataagaatttaatacttctccaatctttccttccttctttaatttcaccactgcatctaccggaaccagtcggtttggatcttccagtacaaatgcattattatatccctgatggctcacctcatagtcttctggtcttaatgtatctgcatcttgaaaactatatttacaaaaatattttgagtttgtcggaaccatgtgatccggatttcctttcggtaccaatccaccatctgtaacaagtgccagtttgatctcagataacggtttatccaaaaccggaagcgggatatcttcgtgattcggcatcacaacttctgtatggaaattttgtccgtgatacttagcaagcagcatagaaattgcacgccttggagccggtatactgtaatcgatctcaattgcaggtcctgatccatgatacccttcttttcttccatctccaataaaatcatttttgatcagtctgtccgcaaattctgcaacggacttcattgcctctctcatcttggcagcattgttctccgtctgtaaaatatatgcgcggtctttataaagatctgtccctggattttccgcatacagagcagtcaccgccggaattttaacctgttcagtcaccgctgccgtagcagctccacatcccaatccatatcttcctgcattgaatcctggtcctgccacaaataaatctgcctgatatttctttacaagttctacaaactccctgcacacttcttctgtatgctccgctatataattatctccgcaaataatcgttgctacaatctcgtaagattcgcccagaagtcttttcagaagaagtcccggacctaccggttcttcttttacactgaccccaacacttgcggtatcttccccgcccattccggcataaaactgattaatataatgtatcactctgatcttctctgacattatgactcctcctttccatttgtctgtggaacttccggcagatcactgtctgttgtcacatagcagtctcctaactgcgaccagattccctgataagcaaagtttgttgtatgtgtaaacggaccatacacatctactcccatcagactcggtacattcgttccctctccaatcaccctctctactcttggatgattcagatcatagttccttccactgtttactactgcatctattttcgaatcggaaatgactaacatatctcctggtttatcgttcgatactgcggacaaattcatcacgcaggtcattcccattttttctgcccagttaaacgccagggcagaatctagctggcaatgtcccattccagatttattgataatcacacagtccgctttcagcgtttctttacagagtgttgctgccatcattcccatcgtatctttcccatcgattttcatcacattgttggcaaatacaactcccacaaattcgatatcctttccgtgtctgcgcagcaattccttcaggtatacttcattttgcaaatagtagtttggttcccagtacctccataccattgctccatccaaaatttctgttggctgcaaaattgtcggaagaaatccaatcgcactttgtccatatacaaggaaattccatgtgtcatgcgacgccatatgcgtaacaagataagcaaccttcggaagtggctttccatcttttccaggtccgactggtcccatttcaaactcttctgtttcatctgctttctgaccaattgcaagttttgccagataaacattgattgtcagtgatgcatgtttcagtgcttctgcataacttgcatctgtgactccttccgctggagtcgcatccaggatcacatgataatgtttagaaaaatgagtatactttgcacatggaccacccatatccatataatatttgatattgcattttgcataataaatatcagaaacaacaacaccttttaacgcaaccgtacgtccttctcccatcggtgcaagttttccccaaattccagggtaggatgtctccggtgcctctgccttacacctcggctgcataatatcatggattcccaaaatacggcagctctcccccggcactgccagtttgatatccagtgtgccgaacaattcgttttttacaagatcaatcaattcctctttacagactgtcagaactccttcttccagactggttttttgtccaaattgtactttgtttacccgaacataatcaatttgtaatctcttactcatatccattctcctttcgaccgagatttatgttgtatggatagatctcttttcactttatctttattgtaaatccttattagcacgcatccaattcacaaaaaaacaatttgtctaattctattacaaatcctcaatatgccaaaaagactccgaaaaggggcacccttcggaatctttttttacttttcgcatatttcttccaacatgtgaagcgctttctccacaatccttctcctatataaatactccccttcttctgcccttttcggttccccgcatgggtaacagatgttgtttcctttcacgacacggcttactcccatatccactgcaatccttgtcaagtttgttatctgtacgaccggaatccctcttttttcaatttcaattccgatataggctccacagcgcgtacttgtaccgcatgctgatgtgatcagcaccgcatctaccttattttttatcacatccgctgcaatttgctttccgagatggatacttctttctaccgatgtcattacccccacagtggagagaaaaaatggacacaatttccctatcttcccctctctttccatttcttgcatcgcatcaatcggcaataggcggttgtaatcttcttctacataacttgtatcatatccttggtggctgacttcgtactcttcctcttccaaactatacgttccatattttcctgcatttgtggacggcattcgatccggatttccttttggcacaagtcccccatcagttatcagtaaaatagtcgcttttctcaaatcacatcgaagttccggaacacttcttttttccggcagatccatcagcacttcgctttgataggattctccataatattttgccagcagcatatcgagacaacgttccggcgcagatctctgatagttgataaacgggataatcttcccttcttttgtgtagcttccctctggctgagaataaatataatctatttgccttaacatacttttaaattcttctttctgattggatttttatcaaattcctctgctcgtttttccatcattctctgattcgataaaattgagtatcctaaagattcggaatccagtatctcacgaatctgttcaaaatacttcatataattatcatgcattccttcatctacccaatctttgataattcctaccagtgcatgtgcttttagctttgccatcagactcaactcactttccgacagcttgaatccgcattcagaatatcccatatcaatattgatcttccaaagttcataataaatttcatacaaagattcaaacagagaattttgtccaacatattgaaaacacgcaaagtaaaatttccgttctgcataaagagccttacatactttcacaaaactctctgtcagcttcgatggatcgttaaaagaatttacattttccaacatatctgtataaaacatccagttgatcagctcatatttgtccttgaaatgatagtaaaatgtatttctactgatattgcagtagtccgtaatatgctttacagaaattttcgataacggctgctgttccagtaattttttcaaagcagttgccaacgcttctttcgtaatagaattattcgacatacttcttcctccacacttcacaaattattgcttcactttttatttttcctgtcatttttctgtattttcattgtatgatagtttttttctatatgcaatattgaagaaatgaatattgaacacttttcatttttgtaatacttttcacttataaaatttgcaaaaaattgtacggaatctctattttttcttacatattcctcttatgtacatatttacaacaaaacattttttcgtaaaatgaatttctctttttctcttgttagcatttgattagaaaaattggtcggaaaaaaagggggttttatttatgtatctatatgctgcaatcgctgcacttccaattttattcactattatctttatggctgtcttcaattggcctgcaaaacgtgcattgcctttctcttggctgatcgcctgcctggttgccggatttgtatggaaaatggattttctggaaatctcagccagaacaatttctggtttcctaagcgctctagaaactttgtttatcatttttggagctcttctccttatgaacgtactcaagcagtctggtgccatggcctcaatcaatcaactcttctctggaattacgcgtgatgcgcgaatccaggcaatcctggtcggatatgtttttgctggattcatcgaaggcgctgctggttttggtactcctgctgctttggctgcaccaattctgatcagcctgggatttccaccgcttgccgcagcagccatctgccttatctataactccacacccgtctgtccaggacctgtcggagttccaaccttaacagcttcttctaccgttcagtctgctgtagaacacctcggcggaaatagtgaagcctttacacttgcattaacaaaatggacctgtattccacatatgatcggtggcatcttcatcattatgatcggaatatgtgtcctaacaaaagtattcggaaaaaataaaagctttaaagatgcacttccggtttttcctttctgcatctttaccggatgtgtgattggcgtaatctatattcttatggcaatctttgcaggtcctgaattaactaccatgactgcatttctgggagcattgccaatcttagtcttttgcatcaaaaaaggattcctgatgccgaaagacatctggacttttgacggcgtatctgaatggggcgaatcgtcttggatgtcctcccagcaagtggcacaggcaaaagataaacaaatgaagccttttctcgcatggctgccttatattgtgatcggcgctctactcgtcgtgactcgcgtaggatttttccatctgaaaccgattcttaccagcgagccttttatcattcacattgaccatattttaggttttgaaaatatttcatgggattttaaattcttatggaaccctggaattttcccatttatactgattgcgattttcaccgtatttcttcacaaaatgacaaaagaagaaatgaagactgcatgccgtgattctgtaaagcaagtatccggagctgccattgctcttctgtttggtgtagccatggtaaatctctatcgcttcacttgttgtccttcgattggaaacttagttgcttcctctgagtttcatggcgaatttaccttcgcaaacagcagtatgctctatgtcatggcaaatgcacttgccaaaattttcaacggaacgtatttcttaattgctccattgatcggagtgctcggttcctttatgtctggttcctgcacagtatcgaatactctgttttcttctctgcaatttgaaacagcgactctgcttgctatgccacaagtactgatcgttgctcttcaaaatatgggaggtgccatcggaaatatgatctgtgtcaataacattgtatccgtctgtgccacaactggaacaatgggaaacgaaggaaaattgatgcgtacaaatatcattccttgcgtaatttattgcgcaattgtcgccgtagtcgtaggtattctgatcatggccggcgtcaatccaatgccagaacttttacactgacatcatcgttcctgtaaaaattttgaacagtatcatcaactgcccaaaatccatacagatttattttctgaatgatgtttctattattcaaaaggagtatgataaagacaagtaaaaaaacagtctgaaaaacgaaaggagacatgatttatgcgttacgaatgtgaacaggtagaactgaaaagaaaagacgatggtacggacttataccttacaaaattctggtgtccagcaagctggcaggataaaaatatccttatggttcatggattaacttacacgcagcatgtatttgatatcaaatacaaagattacagtgtttgcgaatattttgcaaagaacggatacactgtatggcgtctggatcttagcggatatggaaaatctggaaaatacgaagacggatggaaagtcacaacacaacatgctgcagaagatgaaatttatgctctcgaaaaaatctgtgagttacagggtgtagaaaaacttgatttgcttggctggtcatggggaacaatgacaacttccaaagttgcttcacagcgtccggatttattaaagaaagtcgtatggcttggaccttgcttcggcggtgcatttgaagcgactccagtaacagaaccattttcttatctaaactatggatatgtcatccgtgtatggcaacatgttcctggtaccaatgatcttgttactgatttcgatacggtcgaaccagaacttcacggaatgtgggtagaccatacatatgctcaggatggcggacatggacgtccaaacggcggtgcgaaagagattatggaaatcggcgatggctggctgatcgatacaaaagcagtaaaagttcctgtattgattattactggtgacaatgacttctatgtaaacattgacagatgttatcaagctgagaaggaacttccagaaggatccaaattacttcatctgcacggcgctggtcacgcaatgtatcttgaaaaagattactatcagactacacgggaagcaatcttgaaatttatctctgaatagagacaaattcctctataataaaatctttggcaaaagtgatttcttgccgcttctgccaaaagagccgggaacaaaatccccggctcttttcctttcacagtatcaactgcattctatattatgatttactctccaaaatcttatcaatacttaccagtttcacactcagtacaaaaatctcacatgccttcgccagttcctccggtgtcggatatgatggtgcaatacggatattgctgtcttttggatctttaccatacgggaatgtcgcccctgcaggtgtcatgacaagtcctgcctcacttgcctttgcaacaatcgccttggcacatccatccatcgcatcaaacgagatgaaatatcctcctcgcggccgtaaccaggaaccgatttcaagtccttccagctctctctctaaaattgtcaggactgtctcaaatttcggacgcaaaatatctgcatgcagcttcatatgttccaccattccgtgaatgtctttataaaagcgtgcgtggcgcagctgattcaacttatcatgtccgattgtctggatctgcatctgttttctgatcgccacaagattggcatccgatgccgcaatcgctgcaactccggaacccggaaagcttactttggatgtggaacagaatttatacaccatatctgggtttccttcttttttacattccatcaaaatctctattaaatagtcctgcttgtcttcgtataagtgatggataccatatgcattatcccaataaatacggaaatcttttgccgccggtttcagttttgcaaagcggtgtactgtctcgtcagaatatgtgattccctgtggattcgaatatttcgggacacaccagattcctttgatcgcatcatcctcgctgaccagcttctccacaatatccatatccggtccatccatcgtcatcggcacattgatcatctcaattccaaaatgctctgtgatcgcaaagtgtctgtcgtatccaggaaccgggcataagaactttactttgtccaattttgcccacggggtacttcccattaccccatgtgtcatggaacgtgcaatcgtatcgtacataatattcaaactggaatttccaaagataacgatattgtctttcggcacttctgtcatatcggcaaggagctgcttcgcttcacggattccgtcgagtactccgtaatttcggcagtctaccccttcctcgcatttcagatcggattcacttgtaaggacatccatcatccccatcgcaagatccagctgtgctgcagaaggtttccctctagacatatcaagctgcagtccctgtgcctttaccttttgaaattcttgttctaactgacttttcagttctaaaagttcctctttacttctatccttatacgctaacattgcaagacctccaaaatctgttttcaatttaacatcatactcactttttgacgtttcgtcaatactttcttgcatttatttacgtattttcactattttcttttattttttattcttttttgaatgaattcatatttactaattcattttttatcgatatgctttcagaatctctcccagactctcctccgtcacttgatgatataccgttccgtcaatcatcatgttcggccctttggcacactgtttcatacacccgcttgtccgcagataaaatctgcctccctcagatacttctccctgccggattttccactttttctcaagtattttcaaaagatcgtaagagccttttgctgaacaccctgctcctacacatatttgaatctcatgacgataattctccgccttcaggcttggataacgtttgatgactgccgccagaaatgtctccttcatttttgtaacttctgccacttgtttctgcactgctgccggaatacatcctttcacatcctggatctcccgcagcatattgacgagatcctcctgtgaaatcatttctccctcctttgtataatattctataatttcacgaatctgttcttccatcttttcaatctcctttctgtatcttcattgtccatcttttgtattgcatctgttccctttgcctattctctgatatcagcctcaaatcctgccggcgtacatatttcatcaaagagaagatcgccatccacaaaaagccgatatctgaccgtacatgcagcatgttcgtagattcctcttcccatcgcccctaactgcggtgccagaagtttctgcggatggttctgctgtagttgtgcctcaaattttatatatttctgttcaatcactatccgcttctctgttctttccttgactcgagctccacaataagtcgcaagacgatagtgtcttcttccgtaccagatttctgcaatcgttccttcaaaggaaaatggtcccaccggaattgttgctgctgccgccatcaagtgcaatcttcctcctgcccctctgctgcactgggtccagacatattgatctggaaaagacgtgccgcggtctttctcaatatacccgattcctttgccaaaatggagctgctcgcgattgattttcaatgttcctgccacattgtgtctcatactgatgatctcatgtcggcactgcataaatgggatccagcgaaacggacccataatatccccagacagttgggagaatttcccatagacaagcttccctttcattttcaattctctcgtccgtatatcaatagaaatcccattttccgaaaagacatttcttccgatccggcaatacagacgtccctttgccgcataaaactgttccggtgcataatgaattttccagacatgatcatttgcgatcacctgcagcatcgcacttttttctcttcttggattgatatggaacgatggaataaagcaaatagtctgggatccattttcatgcttaaaataccatccttcaaaatagcacttcttttttcgttccccataaaaataattttttctgctcatttcccctccactgctgcatttttcaatgcaggattatcaatcagatttccttctttatcaaaccgcgatccatggcaaggacagtcccacgtctcttcttctggattccacgtcaacttacagccgaggtggggacagcggatgcctccgggagccgccagtcctttggcgctctttgctccttctaccgctgctgctttcaatgctctgatcggaactctctgcggagaaaacactgctgcatttccactttctttctggcagatctgttctgtaatcatcagagccgctgccatcgaggaagtcattccccattttccaaatccggtttctacataccactttttattttttcctgtataaagtccgatgtagggaatggcatcgagtgtcatgcagtcctgcgccgaccatctatctatcgtctcacaatctctccaatattcttttgcccgcctctccagcctcttgtattgccctccggtctcattttccccggtccggtgcccttctcctccaaacaatgtgaactctctgaaattccggaaggagaagtcttccccggaatctactcccaaatacaaatgttcaaagggttgtgcctgtttcaatgcaagtacataactgcgttcttgatgcatccttgcaaaataatatcctggtgtattcataatcggataatgagacgcaaatacaaccgcatctgccaacacgtttccatgatccgtataaattttcccctcctccacaccagttacttttgtgtgctcataaattacaagctgttctgcaagtgcttttaaaaagagcagtggatgaaatgctgcctgtttctgataacagatacttcctataacggaaaatggaagctctgtctttgttgtaaactccgcctcaatccccagatgtactgccgcctccacttctctctttatctgctctgcatcggtcagtgaatagaggtaggaactacattctcgaaaatcacagtctatctgctcttcctgcaccagccgactatacatcttcagtgcacgcttatttgcactgacatattttcttgctttttcctctcccgcctctctgaacagtttttcataaatcaaattgtgagaaatcgtaatctttgctgtggtccctgcagtctgtccacttcccactcgattcccctcaagaacgatcacatcttttcctgctcgtttcagaaaaaaagccgttaaaattcctgctattcctccgccgatcaccgcaacttctgctcgaacactctgagcaagtggcgagaacgcaggaagcttgcttgtcttcgtccagattgtatccatacactccacctcatttttgttacttctacatgttatagaaagtatggacaatttttctctcacttattctgttttttctgacctctgctctgttgtgctcgctttatattcacattataatcgcttctgccgagagaatcttctatgcctttccttctttgaacgcaagaatcatctcatttgtcagactgatatgcttttctgttaccggaatttcttcacgctcaaaccactctgccaaggcaagttcctcttcgtcaagcgtaatctcggcacttccatctaactccgcaaaaaatccaaacaacagtgtatccgaaaaagaccacggctggcttttataataacgcagatttttgactttcaagccaacttcctccatcacttcccgctgcaccgtctcctcgattgtctcgccaatttctgcaaaaccggcaatcaatgcatatttcttgtagtctctgcctgcatattttgacatgagcagccgattaccatccgtcacaccaataatgactgccgggcagattttcggaaattccatctgtccacaatgctcacagcgcatcatacgttcttttttgtcatgtaccatcggtctgccgcatactccgcaaaattttctgctccgataccagttatacagctggaaacctgtaatccccgcaaaggcaagataaagtggcttcgcctgccggaaagcttcagtatgttccatctgaaatgtagacagctgtgcataacggatatgttctcccaaatagaaacacttcccgtctatctcaaacagatatgtataattctcatagatcccatcattttccttttccagttccgcaaaagtcggaaaacggatttcctctccctttttctccaacaatacttgatgtccgtcataacatagcataatactgtctttctccggcggttttgggttgtattcatttcgatagcggtgtggtgcaatatcttgaatcatgatttttacctctttttcttctatttcctatttttcttttttcattcatccacttgtatttttatctgtctgcgagatactcttcttttaaaatatccatgtggatttcatcccagaaacgtccttttgcataatagctttctcttcttcgtccaaactcacggaagccgactttctgataagtgtggatcgctctctcattaaatgcaaatacccgcagcatcacattgtgaaggtttaatgtcccaaaagcaaaatcgagaaggagccttaacacctcctgcccatatccttttccccgattttcttcctctccgataaaaagtccgacttccgcacactgacggatctgattgatctcctgtatcccacagttgccgatcagtgtatcatcttcttttctgatgatcgcaaactgtgttttcccttgcatactttggatccatgcctcttccgcctcaaccgtcatgatcatcgcagaattcccaagtccgtctgtcgtatcaaagtcactgagccacttcacataagttgctgcatcttccacctttggtaccgcaagataaagatgtttcccttccaatttcttaatatatcccattcttttttcctcccatcttttctttctatctgcttctataaaaattttctctttttatcctatttttctcttcgcacaaacctactttcgcgatggtgcaatgtattccttctccacatctttttttcgccagttttgaataaagaaccattttttcggaatggtaacaataaatacaattccaagtacaattccaaatgcgatttttaacgactccagtcctttgatcgccgccagtgtcaactcatttgacacaagatagtacatggtatagtaaacgcctgctcccggcacaagcgggaaaatccccgagatcaaaaagactgtgatcggacatttcttccagactgcaaaaatgcgggaaacaagcacgactccgactgcaccgaagaacgaggcaaccgctgtatccgtaaacggtactatcagataatagcaaaaccatcctgccattccagtaaatgctgcacacaaataaaatttgcgaggaacattgtagagaattgcaaatgcaagtgatcctgtggatgccagaagtaaatttaatacaaatgtcataaaaacattcctcccatcagactattgtaaatagacagtacggttcctgccccgactgcaatatagacaaatacaagaacggcatctaccatgcggacagtccctgataaaatgtcactgtctgcaatatcgcggattgcatttgtaaaagcaattcctggtacaagcggcatgatcgcaccgctgatcagcttatccatccgaagcggaaacggcaggaagttgatcgcgcatagtgtcagcaccgtgataaatgcacctcccagaatattgacgatcacttttgaactgttatattttttgactcccatcagaaatacatgcagcaatactccgatgcagaatgcaattccactttctgtcaaagttgcccccataatatagcagaaacttcctgctcccatccccgatgcaaacgtctgcaacggtttgctcgtgcggggcatctgttcgatctttttcagccgttgaaatgcctcatcgacactgactttcccttctacaatctctcttgagagcgcattgacctccgctacaattcctaaatgtgcacctgacaatggcacatgctttgtttttgcataaattgtcttctcgccatcatctgctgtgataaaaatcccattactcagtacaaatgtatccagtccctgcactccataatgctcacagatatgccacacggtctcctctacccgaaagatctccgccccgtttcttaagaggattctccctgcctccattgccagttccagtactctgtgcgactctccgttattgatttctacaatttcttctttttctttcacatcctgcctccaattctcacacctctattttaagaggattttctccatcagccagcgctgtggcttcatccctgctttctcataaaagcgaagcgccgcctcattaaagttccagacacaaagatcgatgcgttctgccccaatgtcttgtgccagtctctctactgactgatataaactgattccgactccctgctttctatattgctgtgatacataaatatcttcaatgtacaccgtctttttcggcaccatgatcggatgctttgtctcccgtatggtagcaatacagattcccatcagctcgccttcctctgtgtccgcaccaagcgtgatcatttcatcattttgaagcatactgtaaaattcttcctttgtatagactgttccaatttcctccacctgccgatacatatccggtctgctctctgcatgtaatttatggagttccgccataaactggcttacagtatcataatcgatctctcttagtttcctgatcttcatatctattcactccttctttcctgttcttcgttttctcgatagccgtattatagcgcaacttttctccaaagtatacaaaaaatcctcactcttttttccgccacatgttctttcggaaaaacaaaaagagaaagaccacagccacttcccgctgtcatcttccccttctctctatcgcatgcttctttttgccgtctgttttttatgcctcatcaatcgcttttccgatatcgtttctcttatatttgttcgcaaatgtaacccactctgtcgcagcatatgcatttgctcttgcctcttttaaatcttttccttttgcagtcacgccaagtacacgtccaccgtttgtcacgatcgtatctccgtcaaattttgttcctgcatggaagcagtagtacccttcatgtttctggaattcttccagtccactgattggaagccctttgtcgtatttctccggatagccgtctgatgcaagtacaacacagactgccgcattctcttcaaattccagctcgatctgatctaatttcccatcaatacaagcttccatcacttcaaggatatcatttttcattctcggcagtaccacctgtgcctccggatcaccaaatcttgcattgtactccagcaccttcggtccttcctctgtcaacatcaatccaaagaaaataattcccttaaatggtcttccctctgctttcatcgcatcgactgttgcctgataaatatgcgccttgcagaaagcatccacctcttttgtatagaacggacttggagaaaacgttcccattcctcctgtattcagtccctgatctccgtcttttgcacgcttgtgatcctgcgctgatgtcatagtcttgattgtatttccatctacaaaggaaagcaccgatacttcccgtccagtcataaactcttcgattacgatcgtatttccggccgctccaaactgatgatcaagcatcagtgatttcacaccttcctgcgcctcctccagcgtattgcagatcagcacaccttttccgagcgccagtccgtctgccttcagaacgattggaaattttgctgtttccaaataagcaagcgcctcttctgcacaatcaaaattctcatatgccgctgtcggaatctgatatttcttcatcaaatccttcgaaaatgccttcgatccttccagaatcgcagctgccttatttggaccaaatacgcgcaatccttctgcctcaaagacatcaacaattcctccgacaagtgggtcatccattccaacgatcgtcagatcaactgcattctcctttgcaaatgctgccagcttttcaaattccatcgcaccaatgtctacacattccgcatactctgcgatccctgcattacctggtgcacagtaaatcttctctgctttgctgcttcttgacacactccatgcgatcgcatgctctctcccgccgcttcctacaattagtactttcataaattatgcctcctacgattttctaccgtttctctgctcattcttctctgaatgcagacctgttatgccgatctgttctctatctccactcaccaataactcttttcggtacactactcgccgcagactaccgccttcccatcgatcagttcaatcttcccgtttgcgatcaaatcaatcgccttcggcaaaatcttccactccgcctcttccatcacacgccgttgaagcgtctccggagtgtcactatttttcacttccactgccttctgcaaaataatcggaccggtatccgttccttcatctacaaagtgtactgtcgcgccgacaaccttcacccctcgtttcagtgccgcctcatgtactttcagcccataatatccctttccacaaaatgccggaatcaaagatgggtgaatattgatcatgcgatgttcgtactgtctgatcaccttttccggaatcaccacaagaaatcccgcaagcacgatcagatccggatttaactgttgaagctcatcaaggaaagcatcgttaaatgcttcccttgattcataatctttcggtgaaatgcacattgcaggaatcccatgcttcttcgcacgttccaaagcataggcattcttattgttgctgatgacaccgatgatctctgtatttgtaattgtcttagcttcaactgcatccatgattgcctgcaggtttgtccccccgccggaaactaatacaactatttttagcataaagtaactcctttttctcctgcttcgatatgtcctaccacatatgcatcttctccggcagccttgattgctgcaacagtcttctccacatcatctttatcgactgccacgatcattccaagtcccatattgtaagtattgtacatcatctcttctgcaatctcaccttctcttgccagcatacggaagattggtggaaccggatagctgtctttttccacaactgcacgcacaccatcacagagcatacgaggaatattctcatagaatccaccacctgtgatatgactgcatcctttgatcttcactccgctttccttaataccgcgaagtgctttcacatagatctttgtcggtgcgatcagtgcttctccaagcgtagttccaagctcttcatgatatgtatctaaagcgtctttatccatcttaaatacttttcttacaagagaaaatccattgctatgtactccggaagacgcaattccgatcagaacatccccatcttttaattcctttccagtgatcaagtctttctcatctacgactccgactgcaaatcctgcaagatcgtattcatcttctggataaaatcctggcatctccgcagtctctccaccgatcagcgctgcatcggactgtttacaaccttctgcaacaccactgacgatcgtagcgatcttctccggcacattttttccacatgcaatataatctaagaaaaacaacggctctccgcccgcacatgcgatgtcattgacacacattgcaacacagtcaatccccactgtgtcatgcttatcgagaataaatgcaagttttaactttgttccgacaccatctgttccagatactaatgtcggtttttccatttctttgaacttctccatagaaaatgctcccgaaaatcccccgatatttgtcagaacttccggtctcattgtctgtttgatatgttctttcatcaattctactgatttgtaccctgcttcaatatcgacgcctgcatttttgtaatccatcttttctcctccatttcaaggctttccctgctttttcctacatttgtttcagatattctttatgtcctaactgatcaagtttttctgcctttgcctgtacagtctctttcatctcctgagagtatgctttcaatcttccaagcagctccggatcagatgttgcaagaattcttgccgcaagaatcgctgcattgactcccccgtcaattgccactgtcgctaccggaattcccggcggcatctgtacgatagaataaagtgcatctacaccctccaggttctttcctgacatcggaattccaatgaccggcattgggaagatcgctgcacacattccaggaagatgtgctgccatacctgcccctgcaatgatgactttaaagtctttctcctctgcggactttgcatattcaaaaaatacgtccggttcacggtgtgcagaaataattgtcatttcatattctacacccagtttttccagcatatctgctgccttgctcatgactttcatgtctgagtcgctgcccataacaattcctacttttggcataattctctccttttctcatttacaaaataccggcacttggaaatacaaagtatgaaatgatccatcatccatctttttcccggcacctttataagttaccagtataaatacttgttcatttataagttaattttactaataccgggcaaggatgtcaacagtcccgcccggtatcagtgattataaatacttataaggttttatttctaaactcgttcttccaaaaatcttacgcattttctgcatccattcgatctagtggttcattgagactttccgtccccggcagtacgaatctcatatctttcaaaagttcgatcttgctgccatcttttcggatgacactgatctctgccagttcttcatatggaatcgtaatgtctgtatgacactgaaaatatgctttattcacatcttcttttcgcagaatcgaaatagtattgtcctttgcaatgatctcttttccgttcggattgtacacccggttctcctcgttccagctgtaacaagtgtctccgaccgcaaaatgtggtcccatcttctctgcgatcaaaatggtcatcttatccgcgatctgatacttgttgaccatcacatatgccgtcgtattcgttccaatcgcaaactctccaagtggaagtgtctcatgattgtgcagaatattttcccggatataggttttattctcctcttctttctcaaagtttgcacaagtataatctgtgatcattccatcctgaaattcgatcttcagatctttatactgcattccatgcagatatacttcactgacaaacaatgttccgtttgttccttccagtgtcggagaggtgaacacttcccctgccggaatattgacatccgaaccacagttttcaaatatcgtctccttctccggatcatttaaagcatgcagtctgactttgatatccgtctgattctttcctcttccaatgatatgcacgtattcgccttgatccaaggcatcaatcatcgtctgctggatctgtccatacacttcgctgtccactgcattgatctcgattgtatcgttaaagattgcctcgtagtcttctccaatctccggcttcggatacgagatgatcgtgaagcttctctcttctcccttgatatactgattgatcatctggctggacttacttgcaaatgcctgcagcagttcttcctgcttatccgtataggagaatacctccgactttctctccggtgaaaacggtggttctccaaatggatcgatccatgccggacccgcataacatgccgccagctctttctgtttctcatatgtatttttgatcacatccagcttccgctctgtatattttttatcgaggaacaatgcctggtctgctctgtgatcatattcaaactgtttgttgaccgctccgtaataaccggatttctgatggtttttcttggtcacaacactgtttgctgcacgaaagatcaacggacgtaatcccattttttcaaaattgcgtatcgcatactggatcatccgctcaaaccctgcggaatacagcacattgaccgtctttttctttgaaagatctttgccgccaagtataaatcctcttcggaatccttctgtataggtatctgccatcttctgaatcgtctcttccggaagactgttcaggtgacgcatcgtctggatctcataatctgtgatccattctccggtacggaaaataaaccgctcatcactgacatccgtctttgcaagcatcggcacaaacacaccgcaatccggtgagatctgctcttcgatccgatctgccagaaacacatcacaataatcacttgcataccagtacacgatctccttaagttctctgaactccggacactgtgcatcttcaaaacaattatagatttcaataaacagttcattacagattgtattgtattttaattttccttcataggcataccctatctgagcgcgcatctcagtatacagaaaacttaaaaaagttccaaaatcttctccgagtttttctactgcccaagccggatttgcatacgatgttccgtaattttcttctgaaatgtctgcatacagcttgtgattgatttctttcatctcatcaaatgaaagtttttcccacgatccatcttccaccattgctcttacttcttctacaaaaagaagaaattctgccacatgtctaaaatatggacgaaactgctctgcggcagtctgctctgtaccgatcattcggatacgttcgatcgtcagatcgtgtctttcgtgaaatatttcattttcttctttccactgttcgttccacataaacttatatccccctgaaaaatattattgccaaatcgacaaacaaagcggcattgcatacaattccgatccggcatgtaagatacttccgctctcgctcccgcagtccgatcattccaaagaaaatcccaactcccgaaagtatccaggcgcaaattcccaacgcaccgatcattgttgctgcttttccttcctgaacgtacgacactgtaacaagaagagaaagaagtacgatggccgctatagcaataagggtagaacgaactccatgcttcgcatggcggatcactttttcttctccatagcggtttctttttttctgatagcgctgtacttctttttcccgccgtctctgctgtctttctaattctcgctgtcttttttttcgtcttctctcacttctttgcatggtatcttctccttattgcattgcatataacaaacagtatgtagcctgcgagccctccgattgtatttaacagaaggtcgtccacatcgaaagatcctactcttgtaagtagttgaaatacttccacgcaaagactgagtccgaaactgtaacataccgtcataaaaaagctgcggtatttgcttgccatcggcataaagaaaccgaatggcacaaaaattactacgtttccgacaacattcgtgagcactgcaaaagtccccagtgtctcacgatatgtcagaaaacgccgaatctctttaaacagaacgagattgtaacaatactcgctcatttccccagtacgcccataccactctgagaaaagcagaaagtatataatgaacaacacataacatacaaacaacactttcccgaggatacgcagacgttttctttctttatacttcaccattgcaccctttcagaatgattcctctctttccggactaaaaagtcagaccggatttattctttagtaagcgtgcaccccctacgattgtgatcactcctgctgcgatcccggtcacgatcatgatcacaccgagaactatatttcctgcgccgactgtcgtcatcgtcttataaatcttttcgttcataagtctctcctgtctattttgctccgtactgttcatagtatgcatcaattgcagacttgatctcatcatcgatcactacttttccattgcattctttattgtgcaggtgctctactacttccgccatcgtcacgatcgcatttgtctcaaatccatagagatcttttacttcttccagagcacatttcactccgccttttccaacttccatacggtcaagagataccatcagacctacaatctctacatctgctgccccttttactttcggcacagtctcctccatggattttcctgatgtcgtcacatcctcgatcatgatcactcgatcgccatcctgaagtttgcttccaagaaagcttcccttgtctgctccatgatctttctcttcttttctgtcagagcagtaacggacttcctttccatacaattcactatatgcgatcgctgtcactactccgagcggaattcccttatatgccggtccaaataaaacgtcaaaatcatctccgtatttatcgtggattgcctttgcataatactccccgagtctctttaactgagaaccagtcacatatcctcccgcattcatgaaaaacggagattttcttccgctttttaatgtaaattctccaaacttgagcacattgctctccaccataaattcaataaactctttcttatactgttccatctctctacctccatatcttcaggcagcagctgccttgatttactgttttctcttctctattttacaattccaaccatatctttcacagtctcgaactgatatttcttcatatacgcttcgattccatccacgatctcggctgtgacacctggattgatgaagtttgcagttccaacagatactgcacttgcccctgcgaggataaattcaatcgcatcctccgctgtagcaattccgcccattccaatgatcgggatattgactgcatttgccacctggtagaccatgcggactgcgatcggcttaattgccggaccagagacaccgccggttttatttgccagcgcaaatgctcttcgatgtacatcgatcttcattccagtcagtgtattgatcagcgatactgcatcggctcctcctgcctccacagcttttgccatctctgtgatatctgttacattcgggcttagcttcatgatgaccggctgcttcgcatattttttcactgcgcttgtgatctcctctgccgcctttggattctgtccgaatgcaatcccaccttccttgacgttcgggcaggaaatgttgatctccagcatatctacatcttcacttgcaagacgttctacaacttcacaataatcttctttcgagcgtccacagacattgacaatgatctttgtgtcatgctgacgaaggaacgggatatcgcgctcacagaatagatcaatccccggattctgcagaccgactgcattcatcattcctccgtaagtttctgccacacgcggagtcggatttccttcccatggaatatttgccacccctttggtcgtgactgctccgagcttgctaagatctacaaaatcacagaactctgcaccagaaccaaaagtcccggaggcaactgtcacaggatttttccattctactcctgctatatttacacgcatatccattataattccacctccgtcgataagaataccggtccgtccttgcaaatccgcttattattcacattgctgtggtggtctttctcttttgatttgcacacacatgcaagacaagcgccgattccacacgccatacgctcctcaagggaaaggtaacattcgattccgttttcctctgcatagcttttcagtgcacggagcattggtgtcggaccgcacgcatagataatatcagcttccagactatgttcgcggattgcatccataacatttccctttgttccgacacttccgtcttctgtggaaatataaagtgttccatttgcttccagttcttcctttaagaaagtctgtgcatcacggtatcctacgataatctgtttctcacagttcagtgattttgcaagttccagaatcggaggtactccgattcctccaccgatcagaaatgctttcttctcaatcagtgggaatccgtttccaagcggtccgatcaccgggattgtatcccccgctttcatttttgaaaactgttctgtccctgtcttttctcccgtcacgcgatatacgacgcgaagctttcctccctctctgtcaatctcacagatactgatcggacgtgggagcagtttgctcccatcatttgtatacatggaaataaattgtcctgcttttgctgtctttgctgcctttgtctggatccacatgctgaaaatcccatctgcaagacattcctgggagacaacaagtgcctgctctttttctctctctgccataatgttcttcctctatcacttcatcttttttatcattctattagcggttgttcagtgcattgctgatgtctgccaccattgcttccacagctgctcttgatgcatctccgaaattctcggcaccgaattttgcataagcttcctgcttgtaagctgcgataattccacgggaagagtttacgattgctcccagtccatcttcattaaagaaatgtacgaggtcttttccctgtcctccctgtgctccgtatcccggtacgagaatgtaagatttcggcatcacttttctgagaacttttcccatctccgggtaagttgctcctacaacggctccgatgtagctgtattcgtcacccatatgtgcctcgccccatgcagcaactttctctccaactaattcatacagcggtctgccgtcgaccagctgatcctggaactctccgcttgatgggttggatgtcttcacaaggatgaacagacccttgttttcttctttacagatgtcgataaatggattgaccccatccgatccaaggtatgggttgactgtcacgaagtcctcatcaaacggtgcataagatttgcttcctacctgcacatgtccgagatgccctactgcataagcagcggatgtagatccgatatctcctctcttgatatctccgatcaccacaagtcctttttccttacagtaatcgacagtctttttaaatgcttccagtcccggaattccaaactgttcgtacatagcgatctgcggcttcactgccgggatcaggtcataagtcttgtcaacgatctctttattgaactgccagattgcctctgctgctccctctaaagtctccccgaactctgcgaatgctttcttctgtacatgctccggaatatagttgagcatcgggtctaatcctactacgattggtgcgtttgtcttcttaatatttgctactaacttgttgatcatgtttctctcctccactgatatgtctttctatctttcttctgtcttgcaaagctttctcttatccttcatagaccggcacgccgtccacgattgtgcagcgcacttcgccttttacttttcttccatggaatggtgtattctttccttttgagaaaaatgtatgtttgtcaatctcatattctttcgatggatcaaagatgacaatgtccgcgatcttcccttcagaaatcgaacccttttcctcggaaagcccgaggatctttgccggattatagctcatcttctctgccatctgcattggagtaagcactccggtctccaccagttctgtgtaagtcagtgctgccgatgtctccaaccctacaattccaaatgctgcatccttcatggatctgtccttttcctgctctgcatgcggtgcatgatcggtagcgatcacatccatgatgttatttttcagtccttcgcgaagtgcttctacatctgccttgctgcgaagcggcgggttcatcttaaagtttccatcatcctctgtaatatcgtctgtcgtcataataaagtgatgcgggcatacttctgccgtcactgggagtccatctttctttgcctcagcgaccatacgcacactgtccacagtcgaacaatggcatagatgaagctgtactcctgtctcttttgcaagaaggatatctcttgcaacgattacatcttccacagcatttgtaattcctttcagtccgagtgcttctgccttttgatcggcattcatgacaccaccttctaccatatgaatatcctcgcagtgtgcaaagacagcgattccgcttgctgccgctcttctcattccttctctgtaaagagatgcgttcatcacagacttcccatcctcactgatcgcatggcatcctgcctccgccattccttcgatatcagccagttcttctcctgcctgaccgactgtgactgcaccaagttggatcacatgcaccggcgaatcttccttcgcatgcgtatgtacatcttccacacgctcttttgtgtcgatgaccggttttgtgttcggcatcgcacagaccgttgttacacctccgtgcgctgctgcctttccgcctgtctctaatgtttctttatattccaatcccggatctcttaaatgtacatgaaggtcaatgaatcccggcattacataacagcctttcgcatcgatcacccgatccgcctgctcttcaatatgttctttgacaccgatgattctctgatcctctgtcagcacatcacagatcccatccactcccgtagccggatccaaaacatgcccattcttgattaatactctcatactgctctatcctttcttcccagtgtactgtaccttccaacagacaggtccccgtctgtcatcatactatttttattttatcatagcagcacaaaaaaaggaatgtcaaatttgtgttcccttctgacattccttctctttcatcactttggataaattctttccatgctgcactgatttttcagtacactggtacattgtattctattgttcccgaagcacatccatcgcagtctgcagttgattgtcagcctccggatcttcctcatctctgacatactctaccgaaacatccggctcgattcctttcccgtcgatatttcttcccttcggagtaaaatactcagagattgtcaccttgacacaagttccgtcatcgagtggaaatagttgctggacaacgcctttcccatatgttgtcgttcctacgatcgtaccgatcttgtaatcctgaactgctccggcaaaaatctcagaagcacttgcgctatatccatttaccagaactgcaagcggagtatcaaagtcattctttccacttcctcggatttcttcttcttttccgctccgatcctttgtagaaacaatcgttccttccggaaggatcagctccagcatattgcagactgtatcaagatttccacctggattacttctcaaatcaatgacaagcccctgcatgtcctgctcttccattgttgtaagcgcctgttcaaactgtcccatcgtcacactgtcaaattcagaaacactgatgtagccaatctggtcttctttcatctcaaactcgactgtctgagcttcgacttttcctcgcacagccgtcaattcaatctcttctttttcctccccgcgtaaaacggtgatatggacttctgtcccctcttctcctttgatgtctgcaacaacttcatccagttcctcaccggtcacttcttcgccttccaccttatagagaatatcttccgaacgcattcccgctttctctgccggagagtctttgtagactctgcttaccgtaatgattcctgtgtctagattctgagacatcgccgctccgattccaatatattctcctgatgtcgtctcaaaaagttcctttgtttcttcttccgtatagtaagtcgaatacggatcatttaaacctgccagaattcctgcatacataccgtcttccagatcttctgtatctgtatcccgaagataatgctcgtcaataatcttctcaatctctttcagcttttcttttgattccgcgttcagcacactctccgatgactgaatactgttattttcattctttctgattttctctgctacattctttcctagggaaactccgccaaaaatggcacctccccctatgaacatagcaagggcgccacagagcgccccttttaaaaaactatgtttattctccatatgattacctgtcttacatataatttgaaggattcactgctacaccgtttaattctacctgaaagtgaaggtgtggtcctgtcgactgtccggtacttcccacatatccaatctgctgacctttctctactctctgtccagcagatactgtcagtgcagaatgatgcatgtattttgaaacaagtccattgtcatgctggatgacaacccagtttcctgctgatgtactataatttgcaatcaggacagttcctgccgctgctgcatatgtaggtgttccttctggcgctgcataatcatgccctttgtgccctccgacctcaaactctcggatttctccaaagtaacttgactgatatgtcatccccggacatgggtgtgtaaagtacccgctgccagataccacattgtctgatgacggcggaatcactcctccagatgtacttccaccggtactgcttccacccgaaggtgcctgtatctgattgttctgtccggcattgttgttcatcgcctgctgctgtgctgctaactgtgccgcctcagcttccttctggcgccgttcggcctcctgtgcttccgcgatcagttgctgtaatacttttgcgttctccccaatctcagattccagatttgcaatctgaatgttcttattagaaagtagtgtttctacgcttgcacgcttctcagaaagtgtcgtctgaagtgctgacagttcctcgtactctgcacggagttcttcttccttcttctgcacttgctcaaccgtcttctgaaattctacaagcatatctctatcatattccgagatcttagtcacatattccgttttgttgagaaaatctgagatattttctgcactgagaatgatctcgataaattccacatttccattctcgtacatgtatttgatacgtttcttcatgctctcatattgattgttctcagttactttcgcctccacaagctcattctcagcagactcaatctgctcttccttcgcagacatatcatcctgcgctttctgaagttcctggatgactgtgttcagttcattatcaagcgagcttttctcggcttccgcagctttcttctgctcttccaactgctctccctttttttgtgtctcagaaatagatgttgctgacactggcatgacacttccgctgcataacgcacacgcaaggaatagtgccgctatcttctttcctcttaatttcatattttcacctatacctttaaatgctttctgatcgtaaagaaacttccgataaaaccgattccgactccaagaagaagacctgtcggcaataagattttatacacatcccacactggcatgaaatctaaaatgttattcagaatgctaaagcgggtcataatgtaatcaattgctttgtcatatacgacatacaatcctgccagcggaattgctgccccgacaagaccgatcagaataccttcaacgataaatggtccacggacaaaataatccttggcaccaatgtatttcatgatcgcaatctcttccttccggaccgtaataccaatcgtaactgtgttactgatcaaaaatactgttacaatcagcagaatcaagatgatcgccgcagacacatagaggatcagtttattgacactcgacaatgtctttgcaacaacatcggacttattgaccttgcggactccatcaagtccttctgcaaatttcacgacttctttctgtgactctacatctttcatatacacttcatagttatcagatcctgccagcggattgtcatccttaaatccctcggcaagatctttggattctccaaaatattcatccttgaatgtatcccacgcctcatctgccgaaacgtaagtaaccttcaggacatcgtccctatctctcagcgcatctccgattgcctctaccttgctgtcttccagattttcctcaaagaatacagtgatcgctaccccttcttctgccttcttgactatgtagttaaagttaagaattacggaaaagaatagtccgaataagaagatacatgccgccatcgttgcaactgatgccagcgagaacagcttgtttcttccgatattcttaactccctgcttcatcgtatatcctactgtactaatcctcatttatatacccaccttttttctcgtcgctgacaatgacacctttcttcatcgtaattacacgcttctgcatctcgtttacgatttcctgattatgtgtaacgactaatacggttgttcctctttggttcgcttcctcaagcaactgcatgatctcccatgagtttgtcgggtcaagatttcctgtcggctcgtctgccagaaggattgacggctcattgacgatcgctcttgcgattgctacacgctgctgttctccaccggaaagttccttcgggaacatcttatatttctgagcaagtcctacaagtgaaagcgctgcaggtactttcttcttcatcacacgcgtcggagtctcaacaactctctgggcaaatgcaatgttctcataaatatttctgtcttttaaaagtctgaagtcctggaacacaactccaagccctcttctgtacttcggaatatgtctgtgcttcatacggttcagattctgtccattcacgatgatcgtgccggatgtcgggtccaattctttcatgatcaacttgatcaaagtagattttcctgacccactgtcccctacgatgaacacgaattcgccctgctcgatcttcacagatactccattcagagccgcaactccttttgaatactccttcgttacatcttttaattctatcatatgtcctcctatcactaatactccaaggtctccatgtacttcatgtatttcactaccataagagcaatcttgaatgtgatcgcatcttcaaacacacgaagatccaaacctgtgctcttttgcagcttatccagcctgtacacaagtgtatttctgtggatgtatagctgtcttgatgtctccgatacattcagactgttttcgaagaatttattgatcgtcgtcaatgtttcctcatcaaaatcgtccggtgattttccttcaaaaatctcacggataaacatcttgcaaagtggaatcggcagctgatagatcagtcttccgataccaagtgtgttgtatgcgatgatatctttctcattaaagaagatctttcctacatccagtgcaagcttcgcctctttgtaggacttggatacctccttgatatcatttacaatagttccgtatgcaacgtgaacatcttcctcgccctctgactgaagcatctccagaatgttctttgcaacttgttccatctctttgtaaccttcattagctgcaagctctttcacaacgatgatgttcttctcatccacagctgtgataaaatcctttgtcttgctgcccagaagtacacgcacactctcaagcatccccgtatctttctcccgggacgtttcaactataagaataacacgtctcacttccgtgtcaatatgtaattttttcgcccgattatagatatctacaagcagtaagttgtcaagaagcaggttcttgatgaaattatctttgtcaaaacgctctttgtaagcgaccaaaagattctggatctggaatgccgcgatcttaccgaccatgtatacatcctcgcttccaccattcgccattaagatatattcgagctgatgttcgtcaaaaatcttaaagaactggtagccctgaatcacctgactgtccgccggtgattccacaaacggcactaccgcactttcataatcttctgtatctgtaaatgtacttgcaagtacctttccttctgtatccattacacacaaatcgatccgggtaattcccttcaagccttcgatggtgttctgaagtgtctgatttgatatcatattcttctcctccgcttaataaattctatatttctacatatctgtatatatcttaatgcaaaacagcaaaaaaagaaagtagaaatcaagaattattatgcattttttctttcgggagaaatacttacgcacaaaaaaatatcttctcccagtcgtacgattatatcaaataatctcttatttttcaacccctgcctcagattgttcacagtttttaaacattttcctacggttttttacgattcctccgattcttccggtctccctcgacgacagtgatttccaccctttttccatcacctgatcgaggagtccgagttcttctgcaatctcatatttcaaccgttcttctggctctaattcacttaatacaatcttcttttcctttttccgtgacatcttttttctccccttttcctgcaatttcctaattctattaaatccattgtgatatttgtaaatattccctgttttttttaatttatacagactcctcacttcccatggacttctctatgatctaaaaggaaaaagcagctgttcgctgctttttatgtcaccctaaagttttctacatattaaaattctttcggctcatccggaataatgaccgaacagataaaataggcaagaattcccgttccccaacttgtcaagctgagcaatacaactccaagtcttacaagtgtcggatcgatgttgaaatattctgctattcctccgcatactccacatatcattttatttcttgttgatctgtataatcttttctgttccattctaaaattcccctttcttaaaaaacactctgtaaattaattttcctatgaacagtgtttcactcctgctcagaaaagtcaatagtaatttccccggcgccgcattcgatagcaagctttttctctgctcccggatggatacgtttttctgatcccagcgccgtatattcctcatctccgatccacacacttcccattccacactctgtgaaacattcatagtctgtctcttcccctgcaagtgtcagatatatttctcccattccacattcaatttctccttctgacacaactgcctccataatgtcaatttccccggcaccagcctctaaagtcattgtcgttgcatcgactttctcaatcgtaacatctcctgctcccgcactgatttccacatgaccaccgcgaatcttgtccgcagtaaactcacctgctgcaatctcacactgaaacgattccaaacggtatccttttggaatcccaatcacgaccggttctacgctctttcccagttttgactttcgctctgtattctcgatcgtcagtttctcaccatcctggtaacactggatttttctgaagtcctctggaatcgttacttgaatttctgctccatctgtttcctctacgattatctcacctacactcatctcaacttccatccgctttacatctgtaaaaagattttctctttcactccctgtgtactgctcttcaggagccccatacggagaggccacctccgacagatcatcttcaaacagttcccctgaaaagaagtcgaaaacatgctctccgttaaattcaattgtatctgctcttcctccaagcgcaacacccgcaatacaaaacatccctccggtcactgccgctacacctgctatgatccacccggctttccaaccttttttcatcttctcactcctctctgcaaaatctttctacaaatatttacagttccctgaaacagaaatggtaccaccttcaaaatcacccacagaaccgccatcgatccaagcaatccgaccgcggtaagcaaaagtccgattccacttactagcaatccttctccgacagccgtaaacatgtggacaattcctacacctgctgtaaaaattccggaaatgaaaattgcaatcgttcccataccaatccctgccactgctgctacaatcccgatcaccaccccaaagatgacaccgataattgcaatcacaagcggtatcacgatcggcgctcctataagaataatcgcagcgagcaaaattacctttgctgtcctgttgtgtctctcattttcataagtaccacgttcttctgaccgactctgctcatatggatactctccggataccggcattttccgactgtcaaactgaaaatcctgataaccattttctgtgaaggctcctcccagatcgcttctgccatccaggcctgcctttaacttttctgcaactttctttgggctttccagctccgaaattactttttgttcattttcttctcctgccgcatcaaaataatcattataatactgcattgcatctgttcgctcttccactggcacatcctgcaaaagcgctgccagctctaacataaattctattcgattcatgcagtcacacctccctcaaatatctcactgatcttctttgaatacactttccattcctcgcgatacagattcagctgtgccattcctcgatccgtcaccttatagtaccgccggtttctgccgtcaaactgcatatcgtacacttccaggcattgatctttctggagtcttcgcaaaaccggatacaaggtagactccgatacttccaacacttgtctgacatcctgtgtaattttatatccgtaagtcccctgactttctctggatacaactgccaacacaatcgcatctaacaatgccgctcctgtgttaaataccatgtcatcactcctttatctttttctatttgtgattcataatatgataataaatttaatactatttatttatctatattatatagcgtataatattgttgtcaatgtaaaaatatataagaatttatgaagattttcttaatgtcgtgccaatttctgcctgaaacctcctccattttcaggcatacagacaggggcgatacagaatcatctcttgtataagaaactacttctgtatcgcccctgtcctttattattcaatccatccataacatcgaaaatcagaatcgatttccccataaataccatagcaccaaacattctgccacaagtaatgccggcacaccaacataaaatttcggttttctcgtcttgtgatgaaaggtatacattccaagaagcgccccggctcctcctccaagcgccgccaccgtcagaagggtcgcttctggaatgcgccatttccttttcactgcctttctcttatcgattccaaacagggaaaacgcaaacaaattgatcagaagcacgtaaccgattgcgatttctatcatacttgtacctcctctttccgcgcaaaggaatatataattttctcctttactctctttccggtaagtcgttccagcacttctccataatagctaagctgtttctcatatcgttctgcaagctcttcccgagatgctgcccggtctgtcttataatccacgacgacaattccgtctgcctcctcaaaataaacatctatgatcccctgcacgatcagaagttcttcctcttcttcctgtctctcgaacagttccggataaattgtatccgccgaaactccaagtacaaatggctgttcttttttcaggcagccactttgtgcggctttccgaagtctgagaccaagcggactttccagcaatcctaaaatatctttgtagtagatactttccatcatctccggcttaagtttcccttcctcacagaactttgccgcctcagcatacaattgcgaaatagtataactttttccaaaatccagcagttccaaaaacttatggtatgccgttcccctggatgccccggacaaagttcccgtgtatcccggctctgttttctcccgcataaagtttggaaccaaaggaactatctcgggctcttcatacaaaatttctcctgcctcttcctcaggctctgacctttttttcagttcagacacagtaaatttcaatttcatcttctgcatggcttcgtatggatactgataggaaaactgttcttcaatctgcgctctcattctctcatcatagacatatgctgtatcccagtttcttaagagctcttctgtcaatgcctgctccacttcctccgcagtttcctgcaagataagatgttccggaaaaatctcttccacaacgagcggaacctccttctggtacattgcattggtaaacggaacattcatcccatatccattcagcagatctgcaagcacctgattccgaaacagcgccggcaaaatccagtcaaaatacgatgtagccctcgaaagaactccaaatggaagcgctgtttgttctctggactgaatggaagcaaaacttttcaattttttctccagattagaaatgcttccaattaaaatcagtttttcctttgctcttgtaagtgcaacataaagtacgcgaagttcctctccgagattttccagctgaacctttctctggatcacttttttcaggaacgtcggaatcttcgtccggtactccaaatcgactgcatccaccccgactccaagttccgggtggactacaatgcttcccgtcgtatcctgcatattgaaacgcttgctcattcccgccacaatgacgattggaaattccagccctttacttttatggatactcatcaggcgcaccgtatccgcctgctcatcggcaatgtttgcctctccataatcaatatcatatttcctcagctgttcaatatagcgcacgaaattaaaaagccctttataacttgtagcttcaaaagcaatcgccttctccacaagcatctccagattcgccgcccgctgcccgcctcctggcatcgccgccacataatttccatagccagtttcatctagaatctgccagagcagttcgtggatggccgtatacgggagcctctcccggaagtcctccatcttctcataacacctgtctaatttttcttggatcgctctgtcgtcccccatccgccggtaatcctgcaccgcctgataaaaaggtacttccttttcctcgcatttgatcttggcaaactcttcactggaaagtcctgcaaacattgattttaacacagctgcaagcggaagatcctgccgcggattatccagcacacgaagataatctaacaacagacgaatttctctcgtctcaaaatacccctctttcgatccagtaaaggttggaattccttcccggttcagcacttccgtaaagacatctgtccatcctttcaaacttctcgtaagaatgacaatatcgctgtattttgccggacgatatgccccgctttttttatcaaataccgggtgtgctcccacaagctgcttgatccttgccgcaattgcacgcgcctcaagctcccggtcagatgcttcccttacttcggtttgttcggaaaaatcctccgccgtattgaccagcagtacctccgtctccattcccggcttctcctcgtagtctgctcccacatacaatgcagctttctcatcgtatgtaatttctcctagttcttttgtcataatctgctcgaatacgaaattggtgctgtccagcacctctcttctacttcggaaatttttatggagatcgatccgctgtttttgactttcttctatactatatgtgttaaatttttccataaacagttccggtctagaaagacggaaacggtaaatactctgtttgacatctcccaccataaacacgttatagttgccttctgacaccgtagagacacttgtgagaatcgcctcctggatcagattgctgtcctggtactcatcaatcataacttccgcaaattttttctgataatctttcgcggcctcagaagggatgagtccctcctctgtcttttctgtcagaatgcgaagtgcatattgctccatatccgaaaaatcaatcaggtgtttactccgtttcttttcctcgaatgcatctgcaaagaactgtaccaaccctgcaagtacagacatcgttttccctgcttccaccatatctttccacaattcctccggtgcttcatagaaaaactgatccttaagcgctcccacaatatctttcacttcttctctgatattctttaccaaggcagtgagttcttccgatacacttttgtctttgttcgctgcaaatcgcttccacttccagtctgcaaacaagtcatacattccccgcatcgttgtctgcgccagcagcttttgaatcctctcgcgatcctccttgagtgcatcggcatacatataagggccgtccggctcctggcactgtcttatccctttctccagaagtgccattgtttcttccaacgcttttctcaaactctctttcgcataaacagctccttccgaagcctcaaatgcttccatcgtatctacttcataggatttcacacactgacggagccacttttccggctccggattgcttcgagaaaattcatacaactgcaaaataatctcctcgatcttcttgtcgtcccttcctgctgcaaaactttcgatgcaatccaaaaaagattgctcaccggctgtataacagttctccaaaacttcttccagcacatcctgccgaagcagcttcaattctccctcatccgcaatccgaaatcccggatccagatcgatcatatgaaaatagtcccggatgaccgaaagacaaaagctgtggattgtcgtcacctgtgcattgtggatcagtgtcgcctgtcgctgcaaatggacgttttccggctgctcctccaattttttctcaatcgcatcccgaatacgttctttcatctctgccgccgcagcttccgtgaatgtcacgacgagcatctgatctacatcaatcggcggctcatctactgtcagtctcgtgatgatccgctctacaagcaccgctgtctttcctgagcctgccgccgcagacacaagaatatttctgtttctaagatggatgacctgcgcttgttcctttgtccaagatactcccatccgatgattctcccctttcttttttcataatctactctttcacttcttgctccatttgctgcaatgcttccacatctttcaatttggaaagtttccgatactcataccccggtattttcttatcaaatccacagattccctgatacgggcagtaatcacacccagtctttcctcccagttcatatggaaggatctctgcttccccatctaaaatccgctgtccgatccgatttaaaatctgatctgtatattctgacaaaatgttaaatcctcttccgctcaacacttttgacgtctttgagaggctctgatccttatttcttccaaccgggatcacatccgagttccccgaaaaagaacgatccaaatgggtgatgacttcctctgaggaattgacgatgccatctggttttaattctttcaaaactgccttctccccaagattttctctgacttccttttccacgaacggatctttcatctgatagtagaaaattcctgccggaacaatttccttctccggatgtttctgctcttccatctccatcaccgcgttcaaatagacaatcaactgtagctgcaatccatgatacatttctcctaactgaaatgcttttgctccagttttataatcaatgactttgacatagacatgttcctcatcctcatacagatctacacggtcaatctttcctctcagccgcatccgtgcatgctctgacagtgacagattaaccgactccagatgtgccaaatttccaaagctgatctcatatcccgccggaacaaaatctcccttctccagttgcttagtcaacgcccataccgttcttctaagcagacgtttcatacgcgtgatcacatattcatttctggaagaactatataacactgcatttccatagtttgtgacacctgcctccacactttcctcgatgagttgttcccgcaattcctcagaaactgtcgtccatgtcacttggtgctcttctaattttttcgaaaactgttccatcgcactgtggaaaatattcccaagatctaccggtttaaatccatagactgtacgctcttccaacttcatcccataagtaaggaaatgcgcataagcacaggcagagaatttttctaatcttgtcacgctgttctctaagatcgtgccataaagctttctagccacctcttccgataactgatcgtgcggacgtttcagatggtttgccgcaagcaattgctccatctgtacatgccacttagggtgcttccgataccaagtatatagctccttccatgctcctccaaatgtctcacttcgcacctgcagcccttccacaagatacggaagtgccgtctccggtgtcagttccttttcccagaatggcctgtcttcctcctcttccaccaaaagttctggatacatcctttttagatctgcgatcagataggcaggacgcagacttttcccttccgaggagattttagaaaaagtcaaatacagatactcagatggttttgtcagatgcagatacagataaaatttctgaatgtaagcctgctccttcgcccccggtgccagtgccaccttctgctcctgaaatctctcccggtcatactcggacaacagtcctcctgctccctgctttcccggaagccaggtgtcatttactcctgccaaaaataaaactttcacatcctgaagccttgtacgctcgatatctccaacgaccacctgatcgattcccggaggaaccacaccgacctttgcctcctgaagccctgcatcgagaagttctctgtattccccgagagaaatctgctcttccccaagcagttctgtaaacttgtcaaacagctccagtacaatccggtaaatctgggcatattcctttgcaagtaccaactgtccccgctcctgaaactgcacttcatatatgccgatcttcttctgcatctcttcctgaacgagaaatgcataaattgcctccgtcacttcccgcaccgtctttttccggcgcttcaatacctctgtgagtctttctaacttctctataaatttctgccggaatgtattccaacgaagcatgtcctcagcgtctgcatgcggactttgccttacccacatctctttccacttcttatatccacgaatgccgagtgccaccacatagttttccacatcgtccacctcttcccgtgtaaaaccggtcagatttgtcctcagaaaacggaacgtactttcataggaaaagttttcgtcgatcatcgccaaaagacttctcaagtattccacaaaggaattgagcagcacacttcgtttgtgatccataaaaaatggaaccccacaaatccgaaatgctctctccatatattccgcataagtttccatatcactgacaatcacagccatatcccggtagcggtacccctttgtccgcaccagcctgagaatctctgagacaacgaacaccgactcttcctttggatttttgaccgcatgaagcgacagcatatcctgcttgttgtcatacacccgcttcgtatagcggaacaagttctgctctaaaaaagcaagcggcggattttcccggaatctaacaggaacttctccccggtttccatacaactgcacaggaggctctacctcaatgttttcctccgccgcaatgtgcaccaatccggtaaccatctgcttactcagagtaaacaactgatacttatgcttcaactggtaaggatcctccctctgatctatcgtcacagtaacggttactttccggcaaatttttaaaagctgtccaagcacccggttctgtaccggtgtaaatccggtgaatccgtcaagtacaaccacactgtcttttaaaatctctgactgctgcacgacagcactaaagacatccagcaattcttctccggtaatatattttccctgcagatactctccgaatttttcctgaagtttctggatatcgtgaagcttccagtaaagctgcgggccgatctctccactttccattacacgctccagttcctctgcgccaacatcatactgtgtgaattctgagatcaccgatttcacttcactgatgtatccaagacgccggatattgctccccagtacctttaattctccttccatatcccctgctgccttccttagcagcaagcttttcccgatatcgtcaagcacgattcttctgtttccgcccacctcctcaaaaatgcgatgcgccagccgtccaaagcttaatacatcaatattcatgattccatgccgcggatgcagtctgactaattctttctgtgtctgcatcgtaaactgctccggcacaagcacaatgtaattccgatttggattttcgcatgctcctgcaataacctgttcatacagatatctggatttcccggatccagaatttccaaaaataaattgtaacgacatcattcacctcttacttctttccaaacacaacatttccctgttcatccagtatctcataccactccggcacacgctgcgtcatatagagaaacggccagtcttcgatttcaaatttccgctctttctttcccggctctttgacgatcaatgctttcagcgccttgctgcaaatttcaaatgcatatgcccggtcgtactgttcgacaaatccatttttcttcgcatttccaatcttcacagtccggacaagtttcatcgcttctttctgaaacctgtatacatcttctttttcctcgtaggaaagcgctgcaatttccctctctttcaactcctcggcatctgcacccaatgcaagcactgcctctgttttcgatggaaacttccggcattcctcctcaaatacgcgctgcaatacgggatgtcgcgtctcctctccacaatcaaaaatcttccatacccagtttgtccggatactcccctcgctgcgaatatagtgatagatttgctctacgccgcttcttgggatcatcgtcggcaaagtcaccttcaggaaagtcccgtcgatcccaagtaaagacagttctccggtttcacgccctgtattcactactcctacattattccccagctgcattcccatcgtcagctgcttggaaatatagtaatccgccacacgaaaccagttcgcactttctttgacatcccagttccggtccagatccaccaccgtctcaaagacttctccatccagaagtcggtcgatctctttcccgtccagcaatcccgatacgaccggaactgtcagatatttcctgcggcagtatcgcaccatcggcttccagtacgctttacaccctgccactgctgccgcaaagattccaaacactaccagccatgctgccagaccgtttcctccagaaagcgcccactctgccatctgcatcgccgcgcccgctgcgatcatcgcaataaatagaaatactgtcaccaccatcatcttccggaaccatgttccatgtctgagttcttccttagaaatctttctcatacctctcctcctctccggattttctgctcactcctgatctgttccttcctgattccaaaataaaaatcctccgaaaatcatgtatttcattataacatgatttccggaggaaatatagaacgatctcccactataaaattaattttcccgtcttaccaccgtttttctgatcaacaatatactgacacctgccagaatcaccagacctattacaccggatatcagtccatagaatggattcccatctgcgaggccggataacttcatgatcgcattcatgatggcgatcatgctccttccaccaaacagaaaatagtccgcgaggggatatacaagccataaaactgccggtactccaaatgcaaatatgattcttcctattttattcagacgataccagatgatagacaccatataccccgcccctgcaaaaagtgcatacactacagacagcagtgctaccgagacgattgccctcacaacggaagatacctgctctaaaaactctggataaaacaagggtaaaatttctcctccaaatttgatatttccccatccgttcagcttttgatctactgtagcaagcaaggtatcagccactccacacatcccggcaccggctgcgaagacaagcatctttcctgccagaatctgctttctgctcacaccattctgcaataaaaactggaagctttctgtaaaactacacattccgatgatcagcataaacatcgccgacatcatattcattccgttcatcgtcacatattctccaccaatcttgctcgcaatcagcaatgccagtagacgcattccaatctgaacaagatataacatcccaattgactgccacacttcttgaaactgatatttaaaactcttcttcgttctcatatacatccccctctaacgatttgtcatctggataaacatcttctgcaagtccaacttcgccacttccagctcttccggtgctttcttccatttttctttggaacttccgatcacatatgccgtcttcatcgttccgagcatctccgtgccgatcacatcctctccctggctccatatgtcaaccatttccttctttccggaaattctataaccaccggcaagcaactcctctgtcgcacaattcttcacaatcttcccgtcttttaagatcacaacatgttcgatcacacttgcgacctcttcaatcagatgtgtggaaattactatcgtaaacggttcttctatatacttctcaagaagaatccgatagaacatctctctgtgattcgcatccagcccaaggaccggctcatctaaaaacagatatggaacattgacagaaagcgcaagaactagcttaaaaatcgacttatacccggtggaaagtgtccgcacttttttcttcgtattcagcccaaacatccctgcaagttccatcgcatactccatatcgaacttcggataaaattccttcgaccattgaaatgcctgctggatcttcatccctgccgggtaaagtgtctgctcactcatcagatacatattctgctgcacctgatcattttcccttgcaggctttccatctaccagcacttctccctgatccggaaaaatccggttactgataatattgagcatggtggatttccctgctccatttcgtcctagaagcgcatatattttcccatcctcaaactgtacactgacatgatccagcgcctttgtgtccttatagccctttgacacttctttgatctctatccctctcattttgaaaatcccctttctatcatcgaaatgatctccacatctgtaatttccagcttcttcgcctcctctacaagacgacttacaaaattttcataaaactggtctttcctcttttgtcttaatttccttactgcaccttctgccacaaacattcctactcctctcttcttatacacgatcccggcatctaccagcaggttaatccccttaagcgcagttgccggattgatcttataagtcacagatagctctgttgtagaaggaatctgactctcttcctgaaatacccctgtcaagattgcatcttccatcccttctgcaatctgcaaaaatacaggcttctcatcatcaaaattcagcttcatcttttcctcctctcgttatgtggttagttactcaagtaattaactatatatgcattatatccaccactcctacttttgtcaattactttgcttcaaaaagttttgtaaaaaacaaaaaacctcgcaacgttttctatacgtcgcaaggcatctttctctattctttctgttctttctctatgctatatttacacctatgctggaatgtctttttctttcctagaccatcattgcgatcagagaaggaatcaaacagacaagcgcacacaacaaatctcctaaaaaccggcacacaatccgttcgtcatcatccaattccccaaatggaatcaccttctcatcgacaaagtctaccatatcttttgtgatatgtttctcttttttctcttctttttcctccaacaaatgatggatccgaaccccatccagcctaagatattgaatccatgccaacataaggaaaatacatcctgccacaaaaagtgcattctctgcaagtgaccgatatcccccttgattcaaaaacttgtcccacagaaggcagagaaccatcgctacagcaaattttgccacacactgatataacattggacggatcatatatttttgaaatatcatacggatttttttaatcatagtttttcttcctttacctaagtattacttcattttctctgtccagattatactttttcacaaaaaataagtcttgtcaaggttttcccaacaagttctcccctcaacaagacatacttttatcatttttatccagcttttagacaacagcttcgcttttgcctcagccgtgatatttttcttacttttcgatctctctgcgatatccttccagttctttctgatttccatagacaaaatgtcccggcagaatttcttcccaaaccggctgatccacactgtaatcatgaatcgacggatcataaacaataagctctttattcttctcacgctccggatccggaatcggaactgcagaaagcagcgcttttgtatatggatgaagcgggtgcaggaacaactcttctgcttctgcaagctccacaatacgtcccttatgaattaccgcaatacggtctgaaataaatcttacaacagacaagtcatgtgcgatgaacaggtaagtcagtccttttgtcttcttcaactcattcagaaggttcaatacctgtgcacggatagaaacatccagcgcagaaatcggttcatccgccacaacaaactccggctccatgatcaacgcacgcgcaataccgatacgctgtctttgtccacctgagaattcatgtgggaatcgagatgcaaattccggtaaaagaccaacttcccgaagtgcattctgcactttattgtatctgtctttctcatctttgtaaaggtgatgattaatcagaccttctgagataatataatcaactttcgcacgttcatttaaggatgcctgaggatcctggaagatcatctgacattttttgatcacttcaaggtcgagttctttggaaatcttaccactgatgcgacgccctttaaacaaaatctctccggcagataccgggttgattctcgtgatcgcacgtccgatcgttgtctttcctgatcctgactctcctacgagcgcgaaggtctctcctttataaatatcaaagttcacatggtcaactgcaacgaacttcttctttccggttccgaaggtaatctgcagatctttcaactcaatcagtttttctttttcttgcataattcttaccctcttccttccatactcgcacgaagacgtttaattgcctccggctgttcaatcttcggtgcacgcggatctaagtaccacgttttcgccttatgcgttggtgtgatctcaaagaatggcggctcctcctcaaagtcgattgcaagtgccttcttgttacgaggtgcaaatgcatccccttgaatcttattgaataagttcggtggtgtaccttcaatcgtcggcaacggttcccctttcactcctagctgtggaagggaagataacaatgcccatgtgtacggatgccatgcatcatagaaaatctcattgactgtaccatactcaacgatctgtcccgcatacattaccgcaacacggtccgctacatttgccacaacaccaagatcgtgtgtaatataaataactgtcatcttcagttctttctgaagatctctgatcagattcagaatctgtgcctggattgttacatccagcgcagtcgtaggttcgtcacagatcagaatatccggatgacaggcagctgcgatcgcaatgacaacacgctgtctcataccaccggaaaattcatgtggatactgattgtatcgcttctccggaaatgggattcctactttttcaagcatctccagtgccattttctttgcctcagcacctttgattccctgattcaattcgatactttcctgaatctgttttcctacttttttcaatggatttagagaagtcatcggatcctgcattaccatagaaattttctttccacggatcgttctccagtccttctcttttttatatttcgccagatcttttccatcatacatgatcgatccgtgtgtaatacttccattggagtcaagcattcctaagaaagactttgtaaacactgactttcctgatcctgactctcctacaattgcaagtgtttctccttcataaaggtctaaggaacatctgcgaatcgccgtcagttttctgccacgtaagctaaactggatttctacatctttcgcagacaagattggttcttttgtcatagcagtcctccgttctatacgtgatttctcgggtcagccgcatcagagaacgcatttcccacaaggtaaaatgtaactgtaataagagatacaattaccgccgggaaaatcagcagatacgggtgttcgaggaaatagttacgggcatttctaagcagaatacccagtgacggtgtatcgattccaagtccaagtcctaaataagataacgtagactcaagtgcaattgtcgacgggatcgacagtgcaagtctcagaataatgatactgatcaaatatggaagaatgttctttacgagcactctccagatcggagtacctaagcatcgtgaagcaagattgtattctctgtcacgatacatcataacaaggttacgcacatttctcgccatggtcagccatccgaatccaatcagtgaaatacacataattgtaaaggactgcccaacaagaagcgcaatcaatgtcatataaatgataaccggtacgttattaataatattataaacttctgtcaaaatacgatcgaggcttcttatatatccccaaatacagccaatgataactccgagcacacactctccaagcgcaacgatcagcgccaacttaatggatgtctgtgctgcataccatacctgacaccagtaatcacgtccgaggttatctgttccgaaccaatattcaccattcggtgactgaaatgccatagccgaatttgtttttaatgcagcataatcatattttccaatatgcagtgcgatgaaagagaaaattacaagtgcaaaaaaaacaatggccatcacaactgctgattttttcttcagaaaattctggaacacggatttccaataagaatagtctgaatatccggtacgttccgcttcttctgcagaatattccacgaaccgaaataaatcatcttttttctcattttcgcccattatcgcgttcctccttttcctgtaagtttaattctcggatcaagtaacatcataagaatatctccgaggaatacacccagtgtaccaagcactgcgtaaaggactacaagtgtctgcacgacatttacgtcatagcggacaatcgcatccgtaagaagtggtcccattcccggtacagagaagaatctttctaccaaaagagatccacctatcgtgtagagaaatgacgccggaacatattgagccagcggtacaaatgcgttcttaaagacatgtttaatcataattcccgcagaagaagtacccttcacacgagccagcttaatgtaatccttattcagttcatctaccatataacgtctcgtccagagtgcataacttgcgatagatgccagtgacagacatacgatcggaagtatacttgtctctgacggattccgtgtcgaataaagcgacggaagcccgagcactttcgaaccaaatgccaacacaagtgagtatgacacaaggcttggaaccgcatttacaaaaattgtgtatgctgttcctacatgatctaagatccggtctttgtttaatgtctggataataccgataaggatacctacaaaaagggaaatcacaagtgcagtacatccaagtttcatagaaattgtaaatttatcaccaattaccgatacgacatcaacaccgttctgaattcttctggattcgccaaaatcgaatttcagaagctgcccataataacgaacgagttgtttcggcatcggatctaacagtcctgctgcctgtaactgctcttctttctgctctggtgtaaacttcattaactgatcttctgtaaagaaatagtctgtcggaagcattctcatcaacagaaaaacgatcgttacaacaatcaggactgtcacaacagattgtaacagtcgcttgattgtatacttaaacattatttattaaattcctctgcgaatttctcgtaatcttccgtagtataggcgtctacggatgtctcccagtttttatattttgcattctgcataccatagattgcatgagatactgagtaatcattgatctttgataactgccatgaaatctcaaggttgtatgggattgtcatcgcatgttttaacatgtaagcttctgcctgtgcatatgcctcatatctttcatcaagatctcctgtaattgcattcgctttgtttacaaggtctgtaaattctttccatgtagcgatcagttcaggatctgtagcatcgttgatgtttgtgtagttcattgaatagtaagctgtctcttctccgtatgtctcctgtccgaggaagttctgcacatcaccgtagtcagctccccatccattcataacaacagactgaagacttggatcgataacttcctgagttaagctggatacatatgttccgatgtttaattttatataatcatccccaagacattctgcaaagttttcctgaagaactgttgcagagtcaagtgctaactgagaaccagccgggatatagtagtccatctcaaccgggaatttaacaccttttgcagagagttcttctattgcctgtttcttaagctcttctgctttttctttgtcaagtcttctcatcttcttgccgttagactctggaagttcgattaattcttctactctgtcaacgtactctgtaccatctgagaagtatacaagacctttcattgtgtaagctgtattctcgcagctaagtggattgatcatgtttgctctctcataagtttttgtcaggtcaagtccgtagtagatagactgacggaatgcttcgtttgcaatcgctgtattccagtttgtatcatcagatccgtcttcgttcttctttgcatagttgaatttcatctggtaagagaatttattaggaagtttctctgtcagataatcgtgatactggttgttctcatcttcgtagattgctcttaagtttgcttctgcaaggtcgattgtatcgatttctcctgtatcatagagagagtatccaactgttacgtcttcgaccagtttaattgtaactgtatcgaaaagtttacaatctttgtcccagtagctttcgttctttgttagagtctttgtgttaccctggatgaactctgttaagatgtatggtccgttgtaccataatttatcgattcctacagattttacattttctacaccaacttcatcgatgaagccctgagaaatcgggtacagacatgcagatactgctactgtatcaaaatatggtgtctctgctatacagtggtaaactactgtataatcatctggcgtttcgattcctaccatctcaaggaatttcgatttgtcaagctttaatgcctcatctgctgagagtgattttgtatattcacggtattcctttgcacctttgatcattgagattggcatagatgtgttgttaccagcatcgttcttgtgtgcattcaggatccactcaagagctgttacaaagtcatctgcaaccatgtcagccttttcatttccctgctggtctacccatttcacatcgtctctcatcttaaatgtccatgtaagaccattatcttctgtaccccattcttttgcgatacctgccactaactgtccttttggatttgtctcaaggaaaccttcgtttgtgttacaaagtacgtttaagtcagctgccatctccgtattcaaaacaaatacgttctccatctcacgctgtggcacttcataagtcacaagatctttaatctcttctgaagcccctttttcgcctttggattctttcttgccacttccacatccaacagttgttactgcgagtgcagctaccagtgcaagtgcaagccatttgcctcgttttttcataactttctcctccttttataatttatagcattaaagttattataatttttcattgctgcattgtcaataaattttttcatttttttgcatgtttacgcaaaatacttttctcatcgtaattcatcagaattttctatctttttagtatttttatatattttgtatttcatctatccctttttccttttcttttgtctatgcatctactgcctatattctcgtatatatgattttcatattcttcatatagtagattttttacgaaaatcgcattgatctcacaagtatttttctagcttttctccttataaatatttattcattcttatattgtatcatttttctacatttcaaaaaacataggatttttctgatgccacatccagatattccttcaataatttcagagagtttccaaatttttgcaagaaaagatttctaataattcaaaaaactgactttgactgtaattttctctcgcaggtatcaaccggattcttacaaaatatgactaaaaatactcttactcattttctaaagttttatggggcagaatgaaaatacattctgccccataaaactttctatcaatttcatctaagcctctaccgttcctctgtgcttgccgcagctcttaatcgctcgccaaactcgctgctcagtgaaatctttcctatataaaatacttcccctgttgcaaatacttcccagtcatcctgaatctctacttgaagctttccgcccggcatatgaaccgtcacacctggatttgtcatgccaagcttatatgcaacgcccgctgctgcacacgcacaacttcctgatgccaatgtataaccgactcctctttcaaagatctcaatctgaatattctcctggtcaatcacttttaatagctgtgtgttgatcttatttgggaaatatctggcaatctccgcataatcaccaatcttacagacaagtggtttagaaatctctcgcatcgggatcacacaatgcggatttccaatcgacacacaagtaaccggatataaagttcttccaaataccatgtcttcattgatgacttctctgcgctctcccgttaccggaatctcatcactccagaaagaaagctttcctgccgaagcgcgcagcctgcttccatcctcattcagatatgttacctgaatcgctccgcccagtgtgtagaaagttacatgcttcttctgaatgtatccggcatccttcaaatattttgcaaaaatacgatctccattcccacttttctccgcttcacttccatccggattccatactttcacataaattttatcttcctgaaaaataggtccttcgagaattccatccgaacccatcccaaaatttctgtcacagatcattcggacattctcttttgtcagctttaactcatttttattcggatcaaatacaaagtaatcatttcccaatccatgatatttttccaacacaatattcatcactgtaaccgcgcctcctttttcttcatcataacaagcattattccgtaataatatagaaatagtgctttctatattgcagatagtgctgtataatcatcgtaacagctatgaagcacaaccgtagtacaattgattttttatgatctgctattactatatgggaaatgatttgttgatattctttctctccctaaacagaaaaaataattttaggaatcctctgacccgtgcgatgcaacacactgtttcctagctgaaaatcgaacacaaggagactgcctttatggaaacttacgagaaaaaaggatacttatacagcgatttccgcctgttttacctgacggacaccgcttccaaggaatttgaatatcactatcatgactttgataagatcacaatttttctgaaaggaaatgtccagtacacgattgaggggaaatcttaccaactacagccttatgacatcgtccttgtcagccacaatgatatccataagctaaacgtacaagattcggaaccatatgaacgaatcgtcgtctacatctccccggaatttatcaatactcaccagacggcagattatgacctcagcgagtgctttcaaaaggcaaaaaaagaacatacgaacgtacttcggacacactcccacgcaaaaaacacgctggtgcgcgccgttgacaatctgaaacattcattttccgatgtcggatacgccaatacgctctatcagaaaattctctttctggaatttatgattcatctgaatcgtgcaaccttgaatgaacagttggaatttatcgacacagaccattgtaatacaaaagttgtggagcttctccagtatattaaccgaaatctgaccacagacttaaatattgatgatctcgctgccagattttatgttagcaaatactatatgatgcgtctgttcaaaaccgagaccggatatacgatcggaaactatatcaattacaaacgattacttctcgccaaagaactgattgcctccggagagccaatcactcaagcgtgttacgactgcggatttaaaaactattccacgttctcgcgcgcatacaaatctcactttggagaatctcccagacagattcgcgatactctctgactttttcttctcgttccggcaatgagacgctccttgctaaaaaataacgtctctataatttaatcacaaatgccggaaccggaggatgattcgggcggttatagtattcactgacgatcacaagatatttcttcggatcaagttctttcaggtaagctaaaatccgctctttctcttcaaatccactgtcccctccactataaatgcaaagactcatcaacccatctttcttcaataatcgcaatccttcctcgatcgcctgcacactcgtatctgcctttgtcgcaagtgtatgatcccctcccggcagatagccgaaattaaatgtgatgcagctgaccgtattttcctttgcgtaagctcccatatgcacatggctgtccagcacaacttctgtccgttctgcatatccacatgcatctatctttctttttgtctcctgtaccgcctgctcctggatgtcaaaagcaatgacgcttcccgatgctcctacaagctctgccagaagaagggtatcatgcccattgccagcagtcgcatcgatacaaatatccccttccagcacatgccctccgataaaatgatggcaccattcggtaatctgatatttcttcatctttatccccgctttccctttttcaaaatttatacatgcattatactattgattcgaaataccgtcacctacttttgagcatcttgcggaaaaacattacaaagaacctcaatctatgttatgatacatatatctatatcaatttgccctccttcgggcagaaaggacttttatgcaattatacgatttaaaggaaacaaaagaacgtgtcatcctcgtcggtgtgcaggcagatgacaatgaagatacagaaaaatcactggatgaattggaagaactggcacagactgccggggccgagacagttggacggatcatccagaaccgggagcagatccaccctggcacttacgtcggcaagggaaaactggatgaaattaaaaatctcctctgggagacagatgccactggaatcatttgtgatgatgagctctctcctgcacaacttggaaatctccaggatgcactggatacgaaagtcatggatcgcactttgatcatccttgacatctttgcagaacgcgcctctacaaatgaaggtaaaattcaggtggaacttgcacagctgaaataccgccaatcccgcctggtcggtcttgggaaatcactttccagactcggcggcggaatcggtacaagaggtcccggagagaaaaaacttgaaatggaccgccgtctgatcaaaggacgcattgcccagctaaaccatgagttaaaagatgtcaaacggcaccgggaagtgacccgtgagcagcgaagccgcaatcatatcccggtcatcgctatcgtcggctatacaaatgcaggtaaatccacactgctaaatcgtctgaccggagccagtgttcttgaggaggataagctgtttgccactttagatccaacgaccagaggactgaaacttccaagcggtcaggaagtgcttctgacagataccgtcggatttatccgaaaacttcctcatcatctgatcgaagcattcaaaagtacgttagaagaagcgaaatatgcagatatgatcttacatgtagtcgatgtttccaacccacagatggatgaacagatgtataccgtctacgagacactacaaaatctggatgtcaaagataaagtggtcatcaccgctttcaacaagcaggatcgactgacagaagttccaatcatccgtgatttcaaggcagatcacatcgcaaatatctctgcgcggaccggtcaaggactggatgccctgcaatctgtcattgaacagattctgcgcgaacgaaagattgaaatttcaagaacctattcttacgccgatgccggaaagatccagctgatccgtaaatacggagaacttttggaggaagaatatcgggaagatggcatctttgtccacgcatttgtcccaaaagaactttatggaaaaatagaaggcagggagtaatctccactgcctcttatttttatcttgtccgcaaaaattctgcttctttctttgccgcttcatcgtcagggtattttgcaatatattcttctatctttgcctttgcactctcccactcatacaacttttcataggcggcaatctgattaaattccatttcctgtgtcagttctgcactgtttccctctgactgtaacccaagattataatgattcagtgcactctgataatcgccaagctgcatctcacaggaagccagcagattatagagtgtccccgtcttttctgtccctgcatccaatgctttctgaaatgcatttctcgcctcttcatatttctgctgttcccagtagacaagtcccattcctaagtatgcctctgcctgctcctcccctgactctgcttccttttgaaaaagttccagtgcctcatcatattttttctgctcaaacagttccataccttcctccgtcgctctggtacatccggcaaaaactagaagcataaataccagcacacacagcgcccattttttacttttcaacacaattcctccctgattcattatttttccacatacatttcgtcatgctgtggattccccatattctttcttttcctgacaacttgcagacattttccctatcccggatatttcagcaaacacagcgcattaaataatgtaaccagcataatgatcacatctgcggtgatcgccgtccacatagagatcaaccccgttgccgccaaggtcagtaaaatcaatttcatgccgattgacagcacggcattctgtcggattgctccgattgtctcccttgcaatcctgaggattacaagaatcatcgacggatcatcttccatcaaaacgatatctgccgcttccaccgccgcagcagctccaagtgttcccatcgcaattccgatatccgcccgctttaataccggagcatcattgataccatcaccgacatacactaacttctcatcttcctgctgagaatcaataaactcctctaccttctcaaccttttccgccggaagcagattcgtataaatgtgatccatgttcagtaacttgccaacagctcctcctacaatctcattatcccctgtcagcatgaccaattccttatgataccgccttttcagaatatccatcgtctcccgcacttcttttttcaacgtatcaccgatcacaatatatccagcataaactccatcgagtgcaacatacacgatcgtacctgctgcacgcacttttggaacagcaatccgcagttcccttaaaagttctcgatttcctgcatatgccgccttcccatcaatcagagcatagatcccctgtcccggaatttcctgaactacctcgatccgctgtttctctacttcctttttatacattttctgcagtgacatagaaatcggatgattcgaaaagtactcgatatatgctgtcagctccaaaagttcttcttccgtcattccctccggatgaatttcctttacttcaaacactccctcggtcagtgttccggtcttgtcaaacacaaacgtatctgcctttgtcagaagttctagctgatgactgcttttgatcattacaccttgtcttgctgccgctccgattcctccgtaaaaggtcagcggaattgaaataacaatcccccacgggcacgcaacaatcagaaatgtgagcgcgcggtagatccatgtgtaccagtcaccttctgcaaatgtatttggtggaacaatcgccaaaagagctgccgccaacatgatgatcggcgtataaatcgacgcaaactttgtgatcgtccgctcgctgtctgtcttcgtatcattggctttccgcaccatcgccataatcttcgcagccgtagaatcttcatatttctttaccacttccgcttccaacgccccggtcagattaatgctgccactatatagcatcgcccctgccgtcacagtctgcggaagagactctccagtcagtgccttggcatcaaccatactttcccctgataacactctgctgtccaccggaatcctctctcccggacggatcaaaatgatatcgccacattccagttccgatggctccacttgcacttcctgctcatgactctttcgatttgcaaactccggggcaatgtccatcatatttgcaatagatttctttgatcggtacagcatgacttcttcaagaatcgaaccaatctgaaacaataataaaacagaaatgccttctacatactgaaaaataagaaaagagcatgctgtcgcaataagaatcagcagatattcattaaaaatccgcttcttacaaaaactccgcacagtcttttccaccacaccagctgcgattatcatataagtcgccgcaaacaaaataacttcctgctgcagcgtaagatccattttctttaaaaacaccagttctcccaaaaacgctgctgccccgattcctgtcagtaacatatttcttctgactgctctgattcctcccactttcgctctcctcttactcacgaatatgttccattccctgattcataatggttttgatatggctgtccgccagcgaatagaacacggtttttccttctcttctgtttgtcacaagcttcatctgcttcaaaacacgcagctgatgcgaaattgcagactgtgtcatctgaagtacctgagcaagatcacagacacacatctctgactgaaatagcacataaagcatttttactcttgtcagatctccaaagactttaaaaaaatctgcaagatcctgcagttcatcttccacaggcatatcctttttcactttttccaccgtcttctcgtgcacatgttttagctcgcactgctccacttccgcttcctctattttcttcataatgatatctatctccttcatttctgtttcattatcgttcactttgattttgtttgtcaatacttttcttacatttcacagaaaaggaagtgctgcttccatggatttccacttcgcatcacttcctcctgatatatttctattttttcttatataaaatacggatggagtttagtacacagagcattgcaactcctgtatccgcaaacacagccagccacatatccgcaaatcctgccagcccaagcaccataacaacgaccttaattgccaatgcaaacagaacgttctgcttcgcaatacggtttgtacttcgcgcaatctccagcgatgccggaattgcctccatcgaagaagtcataaacaccacatcagcagcttcaatagctgcatcggctccgcttcccatcgctgctccgacatccgctcctgcaagtactggtgcgtcattgattccgtccccgacaaacattaccgaaccattctgctctcggatttttgtcagctcacctaacttttcttctggcagaagtcttgcatgcacttcatcaatgcctgtctgctctgctactgcttccgcgctttcttttgcatctccggtcagcattgcagtgcgtattttctgccgtttcagttcctgtaccgccgagacagcatcttttttaatcgtatcagagatcacaagaaatcccgcaaattctccatcaactgcaacaagtacttccgttccatatgacccctttggaccatttgtcaaatctacctgatactgttccatcagcttctgatttccacagagaatctgtctgccatccaaaactgcctcaattccttttccagaaatttctgtgatccgttccggatcaggaacagacacctttctctcttctgctgccaaaagaatgcttgttccaatcggatgagtggaattcttctcacagactgcggcaagacggagtaattcttcctcttccatttcatttgccacacatttctgcacaacaaaatttccttctgtgattgttcccgtcttatccatgacaacggtctttactccttgcagcgcctcaattgcaacaccacctttgaataagattcctctcttagatcctgctccgattccagagaaaaaggcaagtggcacactcagtacaagcgcacatggacaactaataactaagaaagtcagcgccgtatacacccagtagctccagtttccagtgacaagtgatggaagaatcgccgtcgcaagagcaagcgccacaacaaacggcgtatagactcttgcaaatcttgtgataaacttatcaattttcggcttgctagcagctgcatgttctacagaatccagaattcttgtcaccatggaatcctccaataccttttctacacgcatcttcaacaaacctgatgtgttgacacatccagatactaaagaatctcctttctcaactttgaccggaactggttccccggttaccggtgaagtatcgatcctgctctcaccatctattactgtaccatccagcggaatacgatctcccggccgcacgatcaaaagatctccgacttgtgcctgctctgccggaatgacttctgtcaccccattctgttcccggctgactacttccggtcttaaatcaaccgcgctcatgatctgtccacggctcttttccacagcaatatgctcaaacatctctccaatccggtaaaacagcatgacaccgactgcttctgcatattcctggattgcaaatgcaccaagtgttgcaatactcatcaggaaattttcatcgagcattcttcccttacaaatattttttcccgcagtaagcagaatctcccatccaagcgtcaaataagaactcacaaataagatggtagaaaataattcgtatttgtccttcaacaaaattcccgcaagaaacaatcccgctcctgctacaatttctatgcgttcccgtttctgttctcttttcttttcctgctgttcctgctccctctttttcttttcttctttcttatttaccgataccttcctttttacaatcacttcagactcaatcgcagcacagatcttctgaaattcctccagcaggtccttgtcaccttccgtgaccacttgaagctgatttgtcgtaaatgtgattgtcgcctctttcacctcaggcagcgcctgtatccttgcttccatcttggaagcacagttcgctcatccaagattatcaagcagatacgtctgtattctaccctttctatgtgatgaaatagacttttctttgttatcctcattctccttgttctggtgggaatgtgcgtggtgatgtccttcacagccacaagttttcccatgctcatggtgggaatgtgtatgctcgtgatcatgatgatctccttcacagccacaagctttcccatgctcatggtgggaatgcgtatgctcgtgatcatgatgatctcctccgcagccacaagctttcccatgctcatggtgggaatgtgtatgctcatgatgatgttccccacagccacagtgttcatgaatctctttgtcaacagattctgtcagctctgtctctctgtctttttttgttctttcctctattttcatgcgtaagcacctcctaaacatatgaataactgttcatatgttcatataaacatttttcaatcattttgtcaaggcttatctcctattttttattttatcttttcgttttacacatgactgacagaaactgtcggtcaaaaaccataagaaaagcagctaatccgaaaactaactgcttgtccctcatctgatttcttcaaatttatttctgtaattcttcttttaccagttttatcacttcacccaaggcaatctcacgattctctgctgctgttctggcacggaattctaccttcccctcttgaatacctcttccgacagtaatgcgatatgggatcccgatcagttccatatctttgaattttacacccggacgttcttttcgatcatccagaagtacatcaatgccttcttttttcaatgcctcatacaattcacttccaatacgcatctgctcttcatctttgctggatacaacgaccactgcaacctcaaacggcgctacacttgccggccagataattccagcctcgtcattgtgctgctctacaattgccgccatacagcgttccaaaccaaaaccataacagcccatttccaccggatgaagtttattatccacatcttgatattccaatccgagtgtctttgcatattttgttcccagcttgaacgtatttccaacttcgattcccttacagaattttaatggctttccgcaaaccggacaaacatctccctcatgcacctgtgcgatatccgcaacaatctccacctcaaaatccttcagatttacattaacaatatggtgatctgttttatttgctccaacgataaagttcttcatgtttgtgacctcacggtccataacgatcggacactctaaaccaaccggtcccgcaaatccaacttttgcatgtgtaacacgttccacttcctcaaacggcgcaagctccatttcatttgcctttagaagcttcaacacttttgtttcattcaattcccgatttccttttaagagaaatgccattgtttttccatctaccgtatagatcagcgtcttcacaaattcatttacagacttatggaaaaatgcagcgacttcttccatcgtgcgtgcattcggtgtttccacaacttccatcacctgtccctctgcatctgacggctcactcacatcaatcacctctgtaatttctagattgcttgagaaatcacagccgtcgcaggtgacgatcacatcttccccgatatctgtaattgcctgaaattcctcggataaagatccacccatcgctcctgtatctgcttttacaatcttgtaatttaacttacagcgctccatgatattctgataggcgtggaacattttcatataggattcatgcagacctgcttcatcaatatcaaatgaataggcatccttcataataaactcacgcacacggatcaaaccataacgaggtcttgtttcatctcggaatttcgtctgaatctgatacagattataaggaaaatccttataggaacttcccttcatcatagctgccatcgtaaataattcttcatgagtcggaccgagaacatagttcttctgataacggtctttcagcgcaaacatgttggaaccaaatgcctctctacgtccacttttctcataaatttcttctgggatcatagccggcatcaacagttcctgcgctcctgcagcatccatttcttcccgcacgatttcctcaatctttttcagaacacgttttcccatcggcatgatcatataaattccgctgctgctttttttgatcattcctgcccgcactaataaatttccacttgtactatcttcttcttttacattttcccgcagtgtataaaaatacgaattacttaacttcatttacttccttcctccaataatcaattgctcatttactgcatttagacctattatagcaaaactgagatttgaaaaccatctctgtctatatgtaaattttcatttttcccagaaagatggtcagattttcttcctgggtggcgaatccatagacttttttgatatacggaacataaaatgtcattgaatcacctccattgaaaacgaaaacacgaccgctaataagaaaaacccggaaagaagttccagccgaatatcgctgcattggaacacttcccggccatatttttcattcttgaatacccaaatctcttttccaatctttttccttcctagaggtaaaattaggcatccatgtgctgtatagtactgcttttgcccgctctctcgtcatcctttttctactgcctgattgggaaatgaatgggtgacaaattgtgaagagatatcactgattgtctttgcaaacaacatgatttttatagaatagacgatatcgccatttgctttatgcggtctgtatgatatgatatttctatatctaatataagatattttctccctcttccattacataaccagtgacaaaatcctttcacatacctactgattgatttctccggcaaacaaatgagaggcacattctgattctccatacctcagaagcagccacacagaaacaaaaggaaaaagaagcaaaaaaggaaaaaacgaacatgaaaaactctgaaaaaaagaaacacatctacttgaaaaactatcccaatgtctatcgaatctttcaaaagactttacgattctggtatgcaaaagccataggaagtattattctctgtatcttcatgacaattatttccatccgtttgcttcacaaaggatccatcgaaacagcgattctcttcggattttttacgttacttatcggggtgacaacgctgctctattttctcgggaaataccagatgcttacttcctctgatctcacgaaattagaaaaagcattgcagacgttacaaaagaccgttggaaaccgtttcttttttacagaatcagcaattatcattctgaatgatttttctctttgctattatgactgccgaaaactaaaacgaatctatttttccgatgaacgggaacgtggtaatctttaccagaatgcagtaatccactttgtcaaaaaagatggcagtgaagaaaccatttcccttcggtgcgattgttctgaatttctcagaacaatccggacttactatccaaagattcaattgccgaaaatacctctgactttccagcctatttctgaatcttcctggaaacgtccttaatcttctctttcagaagttattttgattttttatgccaatttccctttcactttttcaactgattttttatcatccagcactaaggaggtgttcgcattgtcatccagacaacaacatgattataattatctcgaaaatgagacagtcttgctccagaaggagcagttgatcaaacaaaattctcggagtgcccgccttgtagcaacaggaaagtttttggaacggtctttctttgtgcttaccgcagcaggtatattcctccttcttctggaaggcggacaagtacaccacaactgggcaaagattctactgcttatcatttccatcgctctgctgctttctctaattttcagcgctgccctgctatattcctcagatattctgcaccatcgtttctggaaatgtccgaattgcggcggtgaacttccgcttctgaccatgccgcggacatttctaaccaaacagagatttgtacagaatcctgacctctatgatctatgtgtaaaaaagcagattcgatgcgtacgacttcccggaagtaatcttctgattccttcccgctgcccgcactgtggtgaaaagttctggaaatacaaaaaacgtaacagacaatgatacttctccctcataatacgaaaggagtgatcttccatgcaaaaaatatccgctggagtttttaaaaattttccccgcttctttttccttccattccttctggcatttttatttcttacgctaaccgcctgccagtttgaggattcctccctgcgagaagatacgactactttttctaaaattcctaaacaatatttgtctaagatccatgcttccaacatcaaacaaattgagcgtatttccatcacgggtggaaaggattctcccacctcacagaacctttccaaagaagaaatttctgccttcactgactggatgcatcaactccgttttcacgaggagatttcgcgcaaggaagccctctcttccggtgcggtcacttactaccatattttcttcttggacggaagcaaattaacgatcagccctggggaaattatgcagataaatgacacttactatcgcctgaacacggaagtttccacgataaaacctccatgttaacttgcgttgcttgccttttcttcccctgatttttatactggcagtggaacatcaatctacatgtgaaaggagacttcgatatgttaggagatcaaattaaaaaatatcgaaaagagaagaaaatgagtcaggaggaactggcaatccctctgaatgttgtccggcagactgtgtcaaagtgggaaaataatctctccgtaccggatgcggaacttctgatccgtctcgcagaggtgttgggaatttctgttgcagaactgcttgggaccgacgaacaaccacattcagaatccctctctgcagaaactcttgctatagaacttgctcgcctcaatgaagagcttgccaaacaagtgcaggaacggagtctttcttcccgcgccgagcaaaaacggaatctgattctctttttttcgatgctttctatgctctttgcactgatcatcgacaatactattgtttccattttactgacctttgcctgccttctgacagcagttatcattctgtaccggaatactgctctgctcacccgcacgacaacctccgtaaaaaaactcggtgtcgttcgaattacaaccctttttaatattggcgtccttactgtctgtattgtaacctttgccttgtcggagatgggcatccttcctttttccaataccgatgggaaattttttgcaatgctgctcgtatctgccattatcctttttaccggcatgatatcgacaagacttcccttcaacagacataccggattgcgacttccatggaccgtacacgacgaagatacctggaatgtagctcatcgtgtacttcatgatctgtccatcccgattgtgcttctctatctgggctgcacactgactgtcccggattttgagactgtcacattatgtgcggtagcactttgggtcggtcttccttcagtaatctccggcgtctttttctggaaaaagatgcatggccgctaaaaaaatacacgcttcaaaaaataggagattgctgtagcatgatttcattctctactgcatcatgctacaatacaaaaaatattctattagatacaagaggttctacgcctatgtcacaactacaagcaaaccatttcagccatataacactcagaccttacaccccgaagactgtgaagaaatcagcattcttttctgtcaactacccacgacctaaaggtcatgggcttgtaactgcccagtcgtacgaacgacatacgtctccgacttttaaccccaaaagatattgctatctaaagtggcgttacatcatagggtggttgacaacaccctttacggataagatatgctcatctgtaactgtatcaggtactaaacttcccatgccatacagtaataatgtctttacgattaagattttacgcagtacacgaatttcgtattgcaacctcatatcttgtcaatgtacaaaagagtgccttgatgagcagcacatcgaacggttttctctttaagaactgctacagtcagtgtagcatatttaacaacaatcaacaaggctcctcccgccagcagatggatgtatgggcgaccggttccatagatcttgctgcatggaataagtcttttctcgcgcatacatcctttgtcgctgtcgatggggaaacaattgctggattcggcgatattgattcctccggctacctagaccgtctctatgtccacaaagatcatcagggaatcggtattgctactgcactctgcgagaaactggaagcatctgtggaaagtgcgacagttaccacacatgcctccatcactgcaagaccatttttcgagcaccgtggatatgttgtaaaaaaagagcaacaggtcgaacgacagggaatcctgctgaccaactatgtaatggaaaaacagcaaaaaaatacaacctcgcaacgtgtactttctaattcactctagaggttgtatttccatatttatattcttaagattttgaataacttttatttcatatttttctattccctgctgtcttccactgccttggaaaccgcctcattaaaagtcggatgtgcacgcatcgcatacattagctgtcgggatgtcagaccgttggcgatcgctgtcgccagttccccgatcatatctgttgcccgctgacacatgatctgtgcgcccagcagtacgtcactgtctgcggcaaacagtactttgataaatcccacttcctcttttgataaaatcgtctgtccatttgcgtccatccggtaacgcccacagcgcactgggatgcctttcctctctgcctcttcttcagtcagtccgaccgttgcaatctccggattcagatacagacagtttgggatgatcgacatggagacaaacagacaacttggcacgatggataagatgactgacggttctaaattgttcatgcgctccacaacatatttcgcctgagcggaagcgacatgcgcaagctgaactcctccgatcacatctccaatcgcatagatacctgggatatttgtcatgaagaattcattgacaagcactttgccgtgatccatgcgaatcttcaagtctgctgcaaacaattcttccgtatagggttcccttcccacagataccagcactgcatccgcggaaagaatctgctttttcccttcggacatcaaatgacagcttacaccatgctcttctttctcgaaccgctctatcaaacttttcttatacacatggattccacgcccgacaagaatcttctccaaagcctcagcaaactcaatgtccatcgacggaagaagccgctctcccaattctatcacagtcacttctgaaccgagcgcctgaaatacagtggcaatctccagtccaatgacaccgcctcctacaacaaccagcctgtcataacatctgtccttcgcctgaagcagttcttcactcgtcattacttccgacaactcctccccaggaagcccaagtttcctcggcgctgctccggaagcaattagaattttatctgcctcatagataacggtatctagtatatcggccgggttctttccatcatctgacagtccactgccaacggtacgcttctgcatatgtgtcatttttacgaccactcgtttatctgcctgaacctgtgcagttccctgtacaaaagtaacaccaagtcttgaaaattcttcctcgattgctttccgcatttctacgacggattcctctttatattgatatagtttctgcaagtcaaatccgatttcctttgcataaagtccgaatttctcacagtctttcatatctttataaatcgtggaggcatgcagcaatgcttttgtcggaatgcaccctctgtttacgcaagttccccctgcctctttcttatctacaacaagtaccttcattccccgttttgttgcctcaagcgccgctacatatccccccggtccggcgccgataatcagaagatcatacttttccatagtcactttcctctcttttcttttatttctcaatcgttcactctatcttatcaatctgccagtcaaccggttccactccatttgccattaaaaatgcatttgtctggctaaacggtctgcttccgaaaaaaccacggtaggcagagagcggacttggatgtggcgcttccaagatcaggtgtttcggattatttaacattgctttcttagtctgtgccggtcttccccacaagataaatacgattggtcgatcctgttcattcagtacccgaatcgctgcatctgtaaattcttcccagccaattccccggtgcgaatttgcctgatgagcgcgcaccgtcagaactgtattgagcatcaatacgccctgtttggcccatttgacaaggtatccatgatttggaatttcacatccaatatcatcatgcagttcctgataaatattcaccagtgacggtggaatgtctacttccggtttcactgagaagcaaagtccatgtgcctgtcctacgttgtggtatggatcctgccctaaaatgactactttcacttcatttaatggtgtcagatgaaatgcattgaacacatcatccgcaggcggaaagatctgtctcgtccgatactcctgattgactgtctcaaataatttcttataatatggcttcttaaactctccttttaatgcttctaaccaagctccgctaattgccgccatcttcttttcctcctgcttttcctaacttttcttttgtttcctttttcctgccggtatctgttatttcatatccaactcgaaccagaatgctaccccattgtcataattttctaccccaaatttctgatgaaaggactccatgatcgccttcacgatagaaagtccgattccatttccaccgtactcccgcgaatgcgctttatctactttgtaaaacttatcccagatccgttccacatcttcctgtggaatcgattttccggtattgaagacagaaatatgtgctttctctcctgtttcttctactttgatctcgataatccgctctccctccacatggtggattgcattgctgatataatttcgcagcacctgctctgtcttaaattcatctgcccatacatagattgtctcttgcatttccaggctcaccttcgcctcggcctgctggatcaaaatctcacagctttgcagcactccgcggattaagcctgccagatcaaatcttgtcatggacaatccgtcatctccggattccaactgatttaatgtcagcagattttttaccatctggttcatcttattggcctcatcgatgatgacgtcacagtaaaattccatgctctccggatcatcatggatcccttctttcagtccttctgcataaccctggatcagtgcaattggcgtcttcaactcatgggatacatttccgataaattctttccggcgctcttcctgtttttccttctgttcaatatctttttgcaattcaaagtttgcggtctttaactgggagattgtctgctccagtttttccgacattcggttaaagctgtctcccaataccccaatctcattgtcaccgccgcttgtatatttggcattgaaatcaagattcgccatcttctgcgagagcatagcaagctccatgatgggatctgtgatctttctggaaaaataccagacgagaatacagctcactccgatcataatgcagcccacatacgcaagaaatctcgtagaaagttttgctccctcccgaatactgtcaagcggtgtccgaatcagaaaatggtatccactgtcaaaacttccccacatttcaatatattctgttctgcttctgatatccttcgccttccgtatttcataataggatgtctgctctaagatctttccgtcctgcttatcaagaagatagccgtttaactgactgttcagctcatcctctccctctttcatcataccgatgaccggatttcctgatcggtcgcgcacgataaaagatatatttgcccgctctgcaagacgtttcatagcttccaaagactccgtgtaaatcacactgcttccgacagactcatttaacatctggtacatattttttaagtcctcttccttgtttgcaatgtaataaccttccatgaatcttccattgatcaaaagtgcgatgatcatagtaaatgcaactatcccgacacttaaaatagtaatctgacgtttgatcgaatctctcattactctacctcaaatttgtatcccatcccccagatggtcttaatgtactcacctttgtcccccagcttatttctcaacttcttgacatgtgtatcgatcgttctcgcatccccaaaataatcgtaattccatacattattcaaaatcttttctctcgaaagtgcgattccctgattttcaataaaatatgccaacagttcgaactctttgtaacttaaatctatcggaactccgtcaatcttcacctcgtgtgctgccttatccacagaaatgccacctgcatccacaacttcatctgccgcaaatacattcgttcttcttaaaatagcctcaactctcgcaacaagaatctttggactaaacggcttggaaatatattcgtctaccccaagttcgaatccttgcaactcatcccgctcctctcctctggccgtcaacatgatgatcggtactttcgagtgcatacgcacctcccggcacacctgccagccatccatctttggcatcatcacatcgagaatgatcagtgcaatatcattctgctcatagaaaatgtccatcgcctccataccatctgctgcctcgacaaccgtgtatccacttcttgtcaggaaatctttgacaagctttctcattctgctctcatcatccaccaccaatatttttaatttatccatcaaacattcgctccttcgttttttctcatcataacaaatacttgtgtcacttttgtgaaaaacaaaaatatctccaggtacgatatttattataccatacccggagacatccccgacacttttttctaaatgcagtctgaatttttcaataacattctcgtcgtcttctgtttctttctattcaacactctttaatgattccaccatattgatcttcttcagtttgaaatacatcacacaatttacaaaaacagagaatccacatgtaagcagtgcgctgtacagaaaactaaaccctttgatcgttcttgcaaacatcacagtatcaatctcaacagtcgtaatcacaaaccggtgaaggatactgcccaatatcactccgacaactgttccaatcagtgtcagaagaatattttcacggtatacataggcagaaacttcattatcataaaatccaagtaccttgatcgtcgcaagctcccgcttccgctcattaatgttgatgttattcagattgtagagcacgacaaacgctaacagccccgcagaaataatcagcacaacgatgacaatatccagactttccagcatctcatccatttgctcctctacattataagcataggaaacattgagcgtcgcacgctcctcgagtactttttctccgatttcctttaactttttctcatcaaattctttcatcttaaagtaaatattatttgcttttggaagtgcaccaaacatttctttgtaaatttcaggagatacataaagataatgctccatataattttcacatacatttgtgatcgtcagttcttttttgtcaccattttcccctttcactgtaatcgtatcgcccttcttcacctcgagtgtctttgccatcttctctgtcaaaatgacgtcccgctctccaagctcaaatgtttcctgtgtctttctgtcacggtagactaaaaattcctgatttttctctaaatcttccggcacatacagatatacgtctttctttatctttcccttctctacatttgttttctttaaatatccttctgaagcctgactgatctccttctccccttgcagatactgctccagtgattccttatccttttcatctgcatctgtatttaagataatcatcccatcatataaattcagttcctgatattggatccttcctacatcaaagatagaatcccgcagtccgaatccgacgatcatcagcgccatacatccaccgattccaaagaccgtcataaagaatcgctttttatatcggatcagattccggatcgtggatttccatatgaaacttaatctgctccaaataaatgtgatacgctctaagaaaactcgttttccctgcttcggagccggtgggcgcatcaacactgccggttgggatgccagttctttataacatgcaagaagtgtcgccgcacttgtgcagaccactgccgcacctgttgccatcgccgcatatccccaatgataagggatcacaatatccggcatatgtatataaatgatcttatatgcagttacaataatatacggaaatactttctctccgaacaatactccgaaaatacttcctccgatcgttgccatcagcgcataattcagatatttccctgcaatactgaatttcccatagccaagcgctttcagcgttccaatctgtgtacgctgttcctcaaccatccgcgtcatcgttgtcagactgatcaatgccgccacaatgaagaatagtatcggaaatacttctccgatcgcccgcatacggtctgcgttatctccatatcctacatagtcagaaagtgtgcttctgtcattgacataccacttggcatcttcaatatccgcaatcttctgctctgcatctttgatcttattttctccatctttgatctcggcttcggcttctttttttccattttcatatgcttcttttgcctcagcaagtttcttttcattgactgcaatttcattttctcccgccgcaagctcagcctccccggcatggattgcttcccatccggcatcaatctgccgctgtccttctgccgcctgcgcttctccggcatacagctcattttcagcttctgtaagctgtcctcttgctgcttcgatcgcagtctttccttcctccaactgtgttctagccgccgcaagttcctgctccttctgtacaatcacctgttctgcctgcgcgatctggtctgctgcctgcgctaactgcggctccaattgtgcgattgtcttctgaagcgctgcaatctgcacctctgtctgtggaatctgttcctctgggatcatcccattttccagcgccgcctgcagttctgccagcgtgatcttcatctgatctaatcctgctttccctgcctcgtactcggctttcttttcttccagttctatgcgtccggctgcaatctgcttctctccggctgcaatctgttccatacctgtctcgtactgacttctgaattcctcttctttcgcctcaaactctgctttcccctgtgcaagctgtgcctgtccatctgcaatctgtgcataagcttcatcgactgtcgtctggctcacgagaagttcatttcttcctgcttccagtgcttgttttccactctccagctgttcttttgcactttgtaactgcgcctcagcatctgtaatctttgcttttccgtcagaaagttctttctctgctttcttctttccttcttccaattccgcttttgcatcggaaagttcttccttggcatctccacggatttcctctgcgcggagcgctccctgccgttctccaatggattcaatccgctctgcaaccttctccaccttctgatcgtattcctctgtaaatgcggtctcctcttctgctccctccactgaaacgtaacactctgtgtatgcttctgtcacaaaagattcttttggcacggcaagaaaaccgctgacctctccatttccgatcatactgcttccacggtgaaaagaaatatactccggactgcttcctgcacctacaatccgaaatgtttccttcgtaaacgtatctgtaaccggatccttcgtcccactgatcagcgtgatctcatccccgacctttaaatctgatccctggataaaatcttgatcgatcagacactctccgtcctttttcggcattcttccttcttccacagtatactggttcatcgaatctaaaatcgacgatacatgaagcactttctgatttccatcacgctcaaccattacatccgcggagtagccgggttctgcctgtgccactccttccagtgaccggattgcttgcacatcattctctgtcagcccaagcgttcccatcaccttcagatccatcaaatgattccggtcaaaataagcatccccggaatagcgcagatccggctcagatgcccggattcctgaaaagaacgcaacacccattgccacgataaagaaaatggacaaaaagcgccccagactctttcgtatttccatataaaaatcttttctcaatgctcgtttcttcatctgtctccctaccattcaatcgtttctaccggtaccggatgtgcattcatctccatactctccacacggccgtttttaatatggatcacacgatctgccatcggcgcaagtgcagagttatgtgtgataacgatcacggtcatccccttatttctacaagtaccctgaagcaacttcaagatcgccttcccggtattgtaatcaagcgctcccgtcggttcatcacacaaaagcagctttggattttttgccagcgcccgggcgatcgacacccgctgctgttcccctccggaaagttgtgccgggaaattatttaatctttctcccaacccgacttcctcaagtaccgtctttgcatccagcggttccttacagatctgaagcgccaattctacattttccaacgcagtcagattcggaacaaggttataaaactgaaagacaaatccaatatcctctctgcggtaaccaatcaactgccggtttgtgtactgtgccacatcctttccatcgacgagcactttgccgctcgttgccgtatccatgccgccaagaatatttaataccgttgtctttcccgcaccactcggaccgacgatcacgacaaactcaccttttccaatctcaaagtcaatgccatccactgctcggatctcgacttctcccatttgatatatttttcttacattttccagttttacaaaatccttcatgttatgccccttcttcttttatgataatcccaagccgctttgacagttccactgcctgaatcatcttccgcagggaagtcttaaagaaattcacttcacttaattccacatgctcccaccggacttccctgcaaaagcagtctgatatgcctgctgcacgaaaactgctctctgccgcttccatcaatggttcctgtctcttcatacagtcacctccaaaatagcgccttccagcccttttgtcatcagctttccggtaagctccgccatctccttcgggctttccatacagccccgctcaatccagtacagcacaattccgatcaccccggacgtacaatagcgaaactgtacctgaaatgcaaatgcctgacgatcacaggaatcttcaaatgcagtcagatatttctcaaaaactgattccagcactttctgcccgactgaaatccgagtgcgattctccagcatcagcatgcaatattctcttcgctccttcaaatatgaaaaaataatctcaagcacatcgcttgcattctctcgcagctgctgcggagtaaactgctctgtgacctcagctgccacagtacacatgtgattttccagatcatccagaatcccataaacatctgtataatgaatataaaatgtgtttctgtggatcttggcgcgctctgtcagctcccggatggaaatctcattgatactcttctctttcgatagttccaaaagtgcctctaatattttcgccttcgtccgctccgttctgcggtctgttgccgtcttttccattgcaagctccttcaattcatttctgtgtattttcctatgcatttgcacagtaaatataattttatagtaaaatttcatttggaatttgtcaataaaggaaatatgaaatttctataaaagaacagcgcaggcaattctgactggataagcatatctatgcgatattttcttatctttcagtcagacagcctgcgctgctctattcactttctactcttatcacaatcgtaaacctgtctttggttctaattatttaaaaccgaaataaattcagcccgatctcttcatcatgatatcgatcgactttcccatcgatcacatggatcaccatctcacaagtcgcgctgatcactgcccgatttaaatgtcctccaaacacttctcccttttcatttcctgcgctcatatgaaggtggcagtaaaactcgtcatgcattgtattgatcgttccggtcagagacacaatctcaaagcttccctgaaattcattcgccagatattctttttcctctgtcttaaatacgccgaccgtaaactggtcaaccgcgccgagtgcctgcacacttgcaagacttattttctctctcagtgcaatttcctttacctgctcaagaatttcctctcctttatctatccgtgcaatgatcgtatttccaaatcttctgtagtccatctctctgttttcctcctgctctttttatatttcacattctgtttctgttgtttcctccggatacacaaggctccagcgctgtcggatttttgtcatgatgtccatcacgtcagaagtataggacagatccatctcattctttccacctaacaccgcctgttccatatcttccacctcatagaacaatgcctcttcctttctgccgcaagcgactatctccttcctgccatcttcggtataagtgatcactgcctgatctgcccttggataatcatagatttccacataccctttctcaaagatcacaacccctctttttggttgttttgcatggagtgtcagtgtgactgtaaccatctcgtttgccggatttgccatcagaattccgacctgctcgtcaacaccactcggtgcagtcctcaccttggataaaatctgatccggcgcctgagacaaaaatatcctggcaaatgcaagggcatagacaccaatgtccaacaaagctcctcctgccagtgccggatcaaaaaagcggttgctcatattatactctttatagcttccaaacgatacctggatcatttgtagttttccgagcttcccatctgcaactacttcctgcagctttttataaagtggcatatgataaatggtcattgcctccgctaaaactatgtcctgtttctctgcaagttgtcttgcttctttcagttcctctgtattcaatgtgactgctttctcacagagcacatgcttcccggctttcagtgcctcccgcaaatattggatgtgcgtattatgaggtgttgcaatatagacaatatctacctgatcatccgcaaacacctcctcaatcttcccatatatcttttggatttgatatttctccgcaaatgccgccgtccgctcttgatttctccctgccactccatagaacatcctgccatgctctgccaatgtctgcgccatctcatttgcgatggcaccatagccaatcactgcccaacgatatgttttgatcattcctgcgctcctttctctgctcctgtttttttatttttatttacagattacaggcaatgtcccacatctgtcaagaacctccattttccatcggaagtaagcgtaaaccctataaaataggtaatccccctctgaaagtgggatttgattcatcaatcctctaaaaccgcacaaaaacttctcccccttcttcccagttgcctaataccaattctcctttgtgtgcgcggatcgcctgtgcggctgaccacaaccccagaccatggtgtccatctgtcctgcgggacttttctcccctccacagccgctcagccgcatggcgcactgcctcctcatcaaatcctgtcccttcatctttcacgcagacctgccatccgttgtctgtcatttttccttccagataaactgtttttcccttcggcgtatattccactgcattcagcacaatattaaatatcccacgctgcaaacgctccggctgaattctccaggatccttccagtctgttatccgttatcagatttactccctttgcttccgcagcagccagagcattttcccgcagtttttcaaaccattcccccaactgcattttcgtaaatgcttcttcttttcccgacgaagtctccagaagacttgcgacatactccttcgcccgaacagttgcctccaaaatttttctgatcagtctctcataatcctgcggcaattcttcctcaagcaacagctctgcatttccgcctgcaagcgtcagcggtgtcttcaggtcatgagccagcgcagcaatctctgcctcgcgctgctgctgcgccgcccactgagaggtcagtgcctgatacagagcttcccgcatctcttccatcgcatccagtgcttcatcgtactcacggattcccgcatgcggaactgtaaaatcaagttcctgcgccgccacctttttgctgatttcctgaaacagtttcaattttttcccaagaaattttccaagccatatcgtatgcagaagcagtgacagcaaaagccccatcccaagcaaaatcaacccgagtgtttccgccggagggagcgtctgtcgaagcgacggatcggtaaattccttccggaaatgccagcggatcagtgcagtgctcccatctgcataagtgcgcctggaaaggtgtgccgcatatccggaaacgtatgaaaactttttctggtcttctgcgatttctctctccacattcgtctttaatatagttcctttggcatcatacaacgcatattcgcccggaaagcactcatccggttctgtgaatttcccactacttgtcccaaggatctcttctacctgatgattgatctcagatccagaacagataatccctttctgctcaagaagagacatcacaagtgaccagatcataaaacacaacagcatcgtaacaaacattcccgccacaaatcggagtaacacaaaagaaagacttaacgtatgttttcttttttccatttatatcccatcccccagactgtctcaatcggacttttcccatatttctttaattttgcgcggatatttttaatatgctctgcaatcgtccccggatccccctccgcatcgaaaccaaagaccgcctcatacaactgttctttggaaaacacctgcccggcatgaagcgccagatgctcacagatctcatactcccctttggtaagcggaagaatctgctcctcaaccatagcctcttttgcctgcatgtcaaaccgtaccccgccgcgtgccatcgcccgcactggttgccgtccttctctccgcaaatgtgcattgacccgcgcccgcagttctgcgatgctgaatggctttttgatataatcatctgctccgagcccaaatccctgcacaagcgccgcatcttctgtctttgccgtcagaaataagattggacaatccacttctgcccgaatcctgccacaaagtgaaaacccatcttcgcctggcatcatcacatccaacagaagcaagtcatatatcctgcagcgctctgccgatacccgctttacatcttcttctgtatccacctgatgtccatcacgttccagcgccatcttcaccagttccagcatctcttcttcatcatctactgccagtattttccccatttcttttccccctttttatctccctgaatcttgactgtttgaaaaaggaagcactgccgcaagcagtaaatatgcaaggattccatttggaaacaacagacacaacccaaaacaaagaatcctcacacttttgggagacagtcccagataggccgcaattcctccacatactccggtaatcttcttatctgctctgctttttcctaaccgtttttctttatttcgttccatttcttttctctcctcttatcatatcacattttttccgtatccaaaagatgcccagacatccacataacagcaaaacaatcgcactgatcattctcctctccatcgatgcaatctgatatccggacacattaaacactgccgtgatcggataaaaatctttcacgcgatccgccatccctgcaaataatccaaataccgaatagatttccgtaaaaaggaagacagaccaacagtttttctgtcttcctgctgcaaatgcaatgattggaaatactgcaaagaatatgccgatcccgccaagaacatattctttccacagcataaacacgaatgatgccgacagatcttctatatgtagcacggcctctgtcaaaaaggtgattccaaaacacaacatggaaagcccgatgctaaaaagcagtgtcagaatcattttcacccgcatcaggtcaatttcctgcagcggtatcaggcgcaaggatttcatcgtgtcctcttcttgttcccgcacacttaaatagctcccaaacagagctgtcatacccggaatcacaaaaaagaacgcccacggttgcatctcatccatataccagcccgcattttcaaggtaccgcatcccatctcgcatcaccttcagcccataatgcacctccaatccatgatacacttccagtccgcccacaaatagaatccctgccgtcagaaagactgctgctaccgcgatcaaaatcatttttgaacggcgaagcttcctgcactccgcccaaaacaaatttctccagttcatattcctatccccctattttcttttggacaactgatattttacaagcccaaaggaaataatgtcccacacgaaaatacaaagaaccgcctttcccacacaactctcctgcgtcacaagcagccccgaaatgtctttctttcggataaggatcgctcccatacttgtgatcggatgaacatacatattgaccggcatcagaaaaaaacctgccagcgcatatacaactgtcatacaggcaggcatcacatagcctcttcccactatcgccagcgccaaaatcggcagcattgcaaatgcaagcagaatgccaatttccatacatttctcaaacaaatacatcatatcttctagacgaaacggtacaaatcccggaagcacactgcaaagaacagatgccactgctgtcagcatcataaatccgactgacaaaactaataccatacaaaatttactgaaaaagtaactttcttccttcaccggcacaagccagatctgcctcacaatctgcagtcgtttctcttcatacacgatcatcgttgcaaaaatcccaaggatcaccggaagaatgatccatgtcgtatatccaaatgcagaccatttataaaattgtgccggctccacctctgcctgccccagatatccgaaatagcagaccgacaacgccggcataagaaatgtagcaagaaccatcatccacacgctctttttccgtctcagcttgtaaaattccgtctcgatcaatctaagcaatgccaacacctcccgtcacatttctaaaatatgtctccagtgtctcttcaccttttttgagttctttcatgtttttctgtgccagtagcactccatgatccataattccaacgcggtccgccaccagctcgatttccgaaagaatgtggctggaaatcaatatcgtctttccctgctctctgctaagctttacgagaaatcctctcatttccgcaatcccaatcggatccagcccattcatcggctcatccaaaatgagtagcttcggatcatgtaagattgcattggcaatgccaagccgctgcttcatgccaagcgaatagtttccaaaaagctttttatcctggtaaggaagccccaccaccgcaagcgcccgcttgaccgtctgctccctcttcagacctctcagtcttgcaaaaatctcaagattttctgtcccggtcagattcgggtaaaatcccggcgcctcgatcatcgcgccaatctgcggataaatctgcttttcctgccctcgcagctttctcccaaacaattccacttcacctgaggtctccggtgtaagcccgagaatcatcttcatcaatgtcgtcttccctgccccgttccttccgagcagcccgtaaatctcaccctttcttacatgaagatctacttcctttacaacagtctgttctccataacacttcgtcagcttccgcgtttctatcgcaaattctttcattccattttcttctccttccttgatttacaaaaatcataacggagaattttaaagattttataaagctgtgatattttttcataatagaatcttttttatgatactctgctcaccaaagaaatgattgagactggctcatgagataaaaaaaaggatatgttacctaatatgggacttttatatttcatcgtcctatacgatagtatcatatcctttttaatcgttttactttttcggcttttccactacgatcagcggaacggtcatctcttcttttgtcattcctgcatgtacaccgatgatgttctctttctcctcattcgtatcaaatagattgagtgctccgactgcgacagcaaagtaatcaccgatcgcctcctgaaatctcggatgatatgctccttctccaaatagctggctctccgtgatctcttctctggaaaataacaggaactctttcccaaaatgtttcttgaaactctcaagaaactgttcttccattccttccttcagatgaaaggaaagcgcccgcggttccactgccggaagacatttcaaacattccctcaattccggataattttccatcgatacatttcttccgtcgatatgtccatgatctgctgtcacaagcagaagtgtatcagaaagctcttcacttaatttttccaattcacggtcaatctttttcagccattctcccgcctctctgcaagtacagccacctccatgcattacatgatccggctccggccagtatacatacagataatttttctcatctcttctgcataacgtcttcacaccgctgagtaattcctcaaaggtatctatatggtaatctccaaacggagatacttcatatgcctttgcctcacaggcatgcataatctggcttcccagcttttcatacggcatcatcctatcagccagcaattctccttcgatcactccgccacttccggtcgtattgagaaatacattgaccttgtcctggatttccggaaaatacatgctccacccaagccatccgtgttccgccggtgcaagtccactctccagtgttgttgtggcggcaaccgttgtaggcggaaatacactggagatttctttttgaaaatgactacgaaggaaactttcctccggcaaaaacctctcaaggacactgacacccattccatccagcacaagaagcaccacatgtctgtaatcctttttcaaaatttcatccgcctccggaagggtagtatatcgatgcggtgcgccataattgtgcaaaatcgaattgactaaattcaaaatactattttgataatccggcttttgtacctgcatgtttacatctctcttcctactacctgcgcgatcatccttcctttttcgatgacctgtttaaatttctctggttttaatgactgtgccccatcactccatgccgcttccgggttattatgcacttctacgatcagtccatctgctcctgctgcaatcgccgcaagactcatagactcaatccatttccagtttccagttgcatgagaagggtcgatgatgatcggcagatgtgtcttctccttgatgatcggaactacactgagatctaatgtatttctcgtatatttttcaaatgtacggattcctcgctcacacagaatgacgttttcatttccgcctgccataatatattctgctgacatgatccactcttcgattgtattggaaagtcctctctttaataagattggcttctgaatctttccgactgctttcagaagagaaaagttctgcatatttcttgccccaatctggatcatatccacatgctccacaaactcttcaatatgctctgcatccatcagttcactgacgatcggaagtcctgtctgtcttcttgcttccaccatatccttaattccttcggtctccagtccctggaatgcatatggggaagtacgcggtttgtacgctccgcctcttaacatatctgctcctgccgccttcacttcttttgcaatctcacagatctgttccctgctctccacggaacatggccctccgatgacaacaatcttctcctgaccgccgatcttcactcctgccacatctacaactgtgtcttccggatgaaacatccgatttgctttcttatacggcgctgcaattcttgtcacctcagagacaagtggattggcctgaataattttttcatccagactcgtggtatctccgatcagccctaaaatatgataatctgttccctgagaatcatttacctgaaatcctctctcctcaaatgtgtggaccagttttttcacttcttcctcgggaatcccttttttcactgtaatgatcataattttttctccttctctctaccctttgtcactctgacttgttcctattttctgcacatcttttcagatgtctgcttctttttgcattttcctaatattaaatatctcttccgatcacctgtgcgatgactcttcctttctcaatcatcgtcttgaatttttctggcttcagcgattgtgctccgtcactccatgccttctccggattgttgtgcacctccacgatcagaccatctgcgcctgctgcaatcgccgcaaggctcatagattctacaagatcccaatcacctgttgcatgagaaggatcaataatgatcggcaggtggctcttcttctttatgatcggaacaacactgagatccagcgtgtttctcgtataacgctcaaaggtacggatcccccgctcacaaagaatgacattctcatttccgccggacataatatattctgcagacatcagccattcctcaatcgtattggaaagtcctctctttaataagatcggtttgttgatcttcccaagtgctttgagcaaatcaaaattttgcatatttctagctcctacctggatcagatctacatactctacaaattcatcaattttatctgcgctcatgatttcagacacgatcggtaatcctgttcgttttcttgcctctaccatatctaaaataccctcagttccaagtccctgaaatgcatatggtgacgttctcggcttatatgcaccacctcttaacatgcatcctccggcttgctttacctcttcggcaatctcacagatctgttcctttccttccacggagcaaggtccgccaatgacaacaactttttccttgcctccaactttaattcccgccacatcgatgatgctgtcctccgggtgaaataacctgttaaccttcttatatggcgctgcaatccttgtcacatcctcgatccacggattggcacgcaccatcttctcatctacaactgtcgtatctccaacgattccaaacacgttgtaattcgttccaagaatcgtgttgacttccagtcctttctcttcaaatccttttacaatcttctctacctcattctgaggagctccttttttacatgtaataatcattttcttctttcctcgtcctctaacctattttctttctctctatgtgtatggcatctgtcacctgcagatcaatgccccagtttttctttcaatacctcaatcgccatccggtaacctgcgattccctgtccggtaatcgtatggaaacacgcctgccccgcataagaaatctgccggaacgcttctctttcttccactttggaaatgtgtacttccacacatggaatttgtaccgctttgagagcatccaaaatagcaatactcgtatgtgtgtatgctgccggattgatgacgattccgtccatcactccatacgcctgctggattttgtcaacgatcgctccttcatgattgctctgaaaacactcaatctctatcccataatcttctccggttttcctacacagttccaaaagcgcttcataattctcttttccataaatccccggctctcgaatcccgagcatattgatgttcggtccgttaatgatcaaaaacttcatcaaatccctccttcactttctgtacagccagcttaaatactgtatcattattaatttcaatatcactatatttctgataaagcggcatccgctcctgctccatctgtcttaatttttctctgcttgtgctaagtggtctgtttccgccgactgccagcgcattcacattccgtcggatatggaatacaatcccattttgccggagtttttccatattttcagcgtttttgataattcctcctccgcaggagatcacttgtccatgctcttttgcaattctggcacagacttcctgttcaatttcccgaaaccgactctcaccatatctctcaaaaatctcaggaatcgtcatcttcgcttccttttcaatttccttatctaaatctacaaatgtcttcccgatttcttttgcagtcttcttgccaatcgtagactttccgcatcccggcatcccgatcaatacaagattcatcatatccttcttcatctcagcaactatgcggtctatctccctgtctgcaatctttgtatccagaaaaaactccactgcgtattttgcctgcgccacaagcatttccagtccattgactgcccgcagcccctgctcctctgcctgctgacagagctttgtcttcatcggattataaatgacatcaactaccgcctctgcattcggaaatttcttcagattgatcaggcattcgtcatttttcggatacatcccaacgctggtcgcattgataaacacctgtatttcctgatacttctccaaatcctcataagagattatcggatccgtctgatttctccctacaatataaaccttctctgcccccatatcatgaaggactgcctccgcggtcttacttgtccccccggtgccaagaatacaacaaacttttccacaaatctctacgccattatgttgaatcatctgcttcaatcccgcaaaatcagtgttcgttgcatataattttccatcccgattgacaatcgtattgaccgcatggatcgcacttgctttctcatcgatcacatcacaatactgcatcactgtttccttataaggaattgtcacattcaccgcatcaaactctttctttttaaaaaattcatgaaattcttcctcggttaatggaatcagatcgtatgtataatctgcaagtttctcgtggattggtttcgaaaaactatgtccaagttttcccccgacaagccctactctcatctggtcacctcctgtatatttttatcagcaaaattttctcatatcctcgatcttcatatcgatcagctccgcctttccaatttcacggacctgaacgattgtaatctggtctccgcttgcctttttatctttcttaataaaatcaatgacctcctggatttcatacggaacatccagcggaatctccatcttctttaaaatgcttttcaaacgctctttcaactgctcatcctcgagaatcttcatcatccccattgctacacattccccatgataataatcatgcagatggtaaatactctcgatcgcatgcccgatcgtatgcccgaaattcaatatctttcggagattctgctccttctcatcctcttctaccacatgcttcttcacgatcagcgagcgggtgatgatctcttcaagagcctgatcgatctcttcctcctcaaacagtcggaaaatttccggatctgcaatcattcctgccttgaccgcctccacaagtccattgtaataatgacgtttcggcaatgtccgaagtgtattcaagtcaatcaacactacctccggatgataaaaggtcccgatcacatttttcacttccccgagattgactgcaaccttccctccgatactggaatcaatctgcgacaaagtcgttgtcggaatggatgcaaacttcatcccacgcttaaaggtcgctgccacaaatccactgagatctccaatcactccgcctcccagcgcaaggattcgatcctttctggaaaaattcagctgcagcagtttttcgcagatctgctgatagaccggaaagctttttgccccctcaccgtgtctgcatacatgtagatacccctgcggacactgtgcaagcacttgcttctgatatcgttccggcactccatcatcggtaatgatcatcaccttacagtttacatctatataatctgccagatgaagcatggcatctctttctataataatacgacttttctgttctgtcagattaacggataattccatctgtccactcctcccactttctctgtttaaagtaaaaaagtatctgcctattcttataaaataagttcttcatgcacccaaaagaaacaactcgaatgttcagggttgaaagatacttatctataaaaataaaagacagatactaaatagttcattctcattattaatcactccaagtagtttgattttattacttttttaatgagaacgcaagtatattatgaaatttttctaaagtttttcgatattagcttccgattacggatggcagttgccacatggagcatatccctgctcgatcacttcctcccgctttccagtataaacctttttattcttctctttcatcgacttgacaccagagcaggattctttgtgaaacttcttactgctcgtatttaatatataagtctgctcactcaccggatctgaactgtctttgtcagaagcagttcctgaaacagcgtttcctgctttgtcagagtttttggaagctggcagaagttcgtttgcctcccagctttctccggttttataatcaatctccactcccggctgtacattatacacatatacattaaaggaaagatctgctccctgatcttccaccgattctgcttccatctgcactcccgatgccacaagattttccccttcaaacaccggtgtgacacggtacatcacatgattgccagtttctttgatgtagtctgcaaccatattttcaaatggaagcatcccttccgtgttcatatatctcgttcctgtgatcaaatttttctcattggcattttcggcagtcagctgataaccgattaaatgacaacggttatacagatattttccctccaccatatcatactttacagtatgccatccagtcggtttcacctgcccgatcgctccacgcttctccgtcggcattagtccctccccgatacttgcctctgcaatactgcaacgcccaagtgcatccaatgttccatatgtctcatatgcttctggctgcaattcttcttccgtaaaatttggctcattgtcatcaatcaccacatacggttccccatcatattctggaatggtctccatagaaatatctgactgctgtgtcccagacaccggaaccgtctcctgctgcgcatttgctgaagttttctcctgttctgccttgcctgcacatgctgacataaaaaccatcacacatgcagtcactacaccgagaagccgatatttcccatttttcttccattgcttcatcctgattcctcctattatgcttttccttatctgacataaacttccttcgtaattttctcatgagaatgccccgaaaattccacgcattccaccatcttccacctagaaaggtccatagcaaatcttatgtctgccggatatttccgattccatcgatataacaccacagtttgtatttcatctttatattcctggatcggcacattttccacaaaacaatactcctcttcgccagcttcttccaaaaatctttctgacacagaaatatcccctgaatacgttcgaaacaattcggcggaatattcattcatccaaattcttgctcgtccatctttcttcacttctttggacaccatccgaaaaatgtcctctattacagccctgtctctgctgatacgacgattatggaacaacatggcattgttatcccccacacatacaataatcttcatatttttccacttcctcccgaatgctacctgaggctttcctctaaatacttcagatatcgctcaaacacttctctcttttttaaccgtctctgaatctttttcctttcactaccaaaatcagccaatgctgcaaacatccatctgagaaatactatcatcccgattactccgacaataagactcatccccaaagggaaagatcttgagacagcaatcccgatacagcctatgcaccataccagtaaccctgctgtcgtacatggatatctctgcccaacatataccaaggtcaaaaagattatttttaaataaatcattatttttatcttccttattattcatcccaataagcttcaaaccttttgcaacacaaaatgctatataaaaaataaaaaccccagtgtacactgaggttttacatggagctgtgcgctcaatatccgaactcgagatagtgagcatattgttccccgaaatgttgaaagtcagcacgagcttgcgtcctttatccccatcatcgtacacataaaccgagttgacaagcgtgtcgatgatacgccgctgatactcaacatcttctatatcacccctcttgaacgattcgagccaatacatgattcgctccttcgtcaagaggggctttttcatttcctcccgggcaatctgcccttcgaggtctctgcgttcttcttccagctcctcaagacgttccttcgttgttggtgtgataatgccttgctctattgcagacatgaggttcttgattctcttattggtctccttcaatcgttcctgtaaacctaggagaacggaggtatcttgaagctccttctcaatcagctccatagctcgagtggatattttctctatgttttcatcggtgagtacctgttgcaccgtgaactcaacgacagtccgctcgagccattcttttttctcgactttcttctcgcagttatgcttcctcttacgatttacgcacttgtagtaatggtgaaccttcccggtctttgaagtgccactctcacccaccataggctcgccacagtgaccgcagaagacctttgtagtgagtagatagtcctctatggctttggcttttgcccgggctgtatagttgtgccggaaggttgcttgcaccttatcgaacaaggtcttgtcgatgatgggtggtactgcgtcctccaagactacatcatcgtatcggtacactccgatgtatttatcattccgcagaatccgggacaggctgttcttattaaaagcatttcctcgggaggtcttaaacccatgctcattcagccaattcacaatctgcgttttggacttaccctctgcgtacatcgtgaagatggttctgacggcttttgcacccactgggtcaatctcatactgacggtcgtttcctatcttatatccaagcacaggacttcccatagcgataccgtggagagcgttctctttcatacctcgcttgatactccgggcaagattctcgctgtaatactccgcatatccctcgaggactgattcaagaatgattccttccggggtgtccggcattggctgtttggcgtagaaaatcttcacaccattacgtttgagctttgctttgtagatggcactgtcgtatctgttccgggcgaagcggtcaagggtgtacataatcacagcgtcaaaatgccccttctcgctgtccttgataagccgctggaagctcggtcggttgtctgtcttgccggagatagcccggtcgatatattcgtctacgacaatgaagtcgttcttgagggcaaactcgtgacattcacgaagctgtccctcgattgattcttctcgttggttgtggctcgagtaacgagcatatattaccgctttgatagtctcacctccaatatcttctttctatatatcaaagcgaagggaatgaccttatcacaccgccgcagttgttcccttatccccctcaagctcctcacggttctcaaattcataagccatagacatgaactcatgcttcgctcgccgggacagtccccggtagatacgaagaatgtcttcctcgtcttcgttggctggtttggtctcgggtaagtcttcctcgtctgcgaagaagtccatgacggaacactcaagcaattttgccatttccagcatttcggattccttcggtaatgaccctttagtgttgatggctgttgcgaaagaacttgaacccttaacagctttgacaatggcggtcagattcgtgcctttttcagcacagatacgattgatattctctgcgaatgtcatagtgattcctcctctgcaaaaaataaattcgtaaaaaccgaattttcctattgacaattcgcataataagaattagaataagaacatgaagttcggaaaatgcgaattggcaataagaaagcgacctctcgaaaatggcagttttcgggaagttatagttattgatggtcttataagaataataacaataattcgcctatttgtcaatggcaattctgatttcaagaatttatatcgtgaaggaggtaagagattcgtggacattaaagagagaatggcaaatgtgggaatgacacaggtagacatgatactggaattgcagaagcgaggttatgcagttcagccgcctatgatgtcaagtattctccgaggggtttatacctatcccaaggcaaagcagattctcgctgtttgcaaggaaattctcaaggaacgtgagaatgaatgagcctgtcagaagtacaggtaaatgacctcgcaagacccttagtgggtatcatcacaaagttttacgcagaccctaagaatgaggaggattttcagaaatggctacgcaatgtagaggaacaaaaacaaaaagaatcaacagacataagctcgctgtgattcaagcatatatcatcatcggtacgctggtactgattggctttatcggtggtcttgtcgtaggacgagctaccgctccgaagaaacaagttaccgtaacggagacggttgaagttccttcctacgaagccgattccctcccggttgccgaagaagttacatatttcgatgtaccactttcacacagcttgcagagatacatctacgaggtgtgtgcggacgaaaatgttccagtgtcactcattatcgcaatgatagaccaagagagcaagttcaacccggaagtggttagtaagaccggggattacggtctcatgcagattaacaccatcaatcacgaatggctggcagaggaatacagaacagcggatatgcttgacccatatcagaatgttttctgtggaattaaggtcattggttcgtacattcagaactacaatgactacggtttagctctgatggcatacaacatgggtgactacggtgctaagaaagcatgggaaaacggtatcaaatccacctcatacagtgagagcgttcttgctctcatgcaaaagtatgaacaggaggtgaatgtaaatgccacaaatgctgacgctaagtaacggcagacccgaaacaatcctatccccgaaggattttgaggatttgattgataagcacatgggtatggactgtgcgaattactatcagaatcagatagaacagctttcagaactcattcgagaccttgacagttatgtggacgataaagacgttcactcgaccgtcaaggaggtgctgaaagaacatggctactaaccgaaaaatcggtaacagttttgagaccgagttctgtgagctactgttccagcatggattttggtgtcacaacatggcgcagaacgccgccgggcaaccagcagatgttatcgctgttaaaaacaaaacggcgtacctcattgactgtaaggtgtgttcaaacaaccgattccctctctcgagagtggaagaaaatcagcactttgctatggaaacatggaaagcctgtggaaatggcgagggctggttcgcactcaaggtcgaggacgaaatcattatgattcctcacttttcaatggtggctctctcctatgagaagtcaactctgaatctgacggacattcgagagtatggaacgccactggaaaggtggttgaagaaatgctgattgaagtctcaaacacactgacagtcgagaaccctaccccggaaatggtgctgtggtgcaagagaaacctcaccataccaaacccggaatatgcgaagaaatctcgcatgaacctgtggctcggtaacacgccgaaagtcctgtcactctatgagacccgaggaacaacgctggtgcttccgtttggaacactccgactactaccgaaggacatatccgataaggcactgttcttgagcgaatttgccgcccctgtggaggtaaattataacgccgatgttccactttatgactaccaagaaatcgccgtacaagcgatggtagccgccaagtatgggatattacagagtgccgccggaagcggtaaaacgcagatgggtattgccctcgccgcaaggctgggacggcgtacattatggctctgccacacactcgaccttattaaacagagtaaggaacgagccaagctctatatgagcgaagacctcatgggtactatcacggaaggaaaagtcaatctcggtgagggaatcaccttcgccacgattcagaccatgtgcaagctcgacctcgcacagtaccgggactactgggattgcataatcacagacgaggtacacagggtcagcggcagtcctaccgccgtgacacagtatcaaaaagtgctgaacagtttatcggcacgacacaaatacggtctgtcagcaacggtacacaggtcagatggaatgattaaagctacctacgccctcgttggtgaggttgcctacaaagtcccggacgaagctgtggctgacaagattatgaaggtaggtatctaccctgtgggtacaggggtgcagataagccgggaagcccttaacacggacggaacgctgaactacacaaagctcattacctatcttaccgaaaacgccgcccggaatcagctcattgcagattccattgagcagagaccttctctgattctgtcggacaggctgaatcacctcgaggtgctgataagtcttctcccggctgatatgcggaaggacgctgtgatgataagcggcaaaatgactaccaaaaagggcaaggctgaacgagaacaggctcttgaggatatgaggagcggcaagaagaaatacctttttgctacctactcactggcgaaggaaggattggacgtaccacggttggagcgtctgtacctcaccaccccacagaaggactacgccgtggtgacacagagtatcgggcgtatcgctcgtacctttgaagggaagtcagaccctatcgcttatgatttcgtagacgatatagcttacctcgtgaagtcctataagaagcgatgtacgacctatcgaaagaacggttgttacttcgtaaaggaaggagggacaagcccatgcgattgatttcttatgactgtgaggtcttcgcctatgactggctcgtaaccctcaaggataaggaaacaggtgtttacacctgtatttggaacgacaatgaagctctgaaaatggcattgtccgatgattgtatctatgtcggtttcaactcgaaacactacgaccagtacatcatcaaagcgattgccgccgggtttgccccggaggaaattaaaaaggtcaacgatttcattattgccggagggcaaggctggcagtgtccgcttctcgatggtatctacttccgtttcagtaatgtggatattcgagacgatacgcaacaggggctatctcttaaagctattgaaggacacctcggtatgtcggttaaagaatccagcgtaccgtttgacattgaccgtcctctaaccccggaggaaaaagccgagacggagttctactgcaaacatgacgttgataccgccgagagactgattgacattcgtaaagactacttgaagaacaaaatcaacctcggtcggctggctggtcttgatgaagtcaaggcaatgggtatgacgaacgccaaactgactgcggcaatgctgaaagcaaccaagaagccgcacgatgatgaacgcaagtatgtgtacccggacaatctgcgaaaagagtacataccacccgaggttttcgctttcttcgatagaatgtatgacctctccatttcagacagtgagcttttcaaaggcaagttcaatctgaacatcggtgagtgtcctgtgacactcgggtatggcggtattcatggtgcaatcccaaacttcttttgggaggaaaccaaggatagaggaatttggaatgaggacgtaggaagctactacccacacctctgtaccatcaatgggtacacaagcagaaacattccgtctccgcagatttacgaggacattctcgaccgccgtatgaaagcgaaagccgctggcgataagcacacggcgaacgctctgaaactggtttgcaacaccacctacggttgcttgctgaatcagtacaacgacctctacgaccctctcatgggtaggtcggtctgcatttccgggcagttatatctactggaacttgcagagcattgttaccaagagattgaaggactgcgaattgtccagctcaacacggacggtatcatggtcgagtgcgataagaaggactacgacacactgaccgctatctgtgctgaatggcagtctcgtacaggctttgacctcgaggaagataccgttgtcaagatagcgcagaaagacgtaaacaactacgttgaggttcagccgggcggcaaagcaaaagccaaaggcggctatctcgtgaagggtatcgctccggctggtgctttcaatatcaataactcctgtgtgattgtggctaccgccctcaaggagttctttgtaaacggaacgcctgtcgaagacaccatcaatagttgcgatgatattttccagtttcagattatcgccaaagccggggcgaagtaccgggaagcctatcatgtggtggacggtgaaaagcagtccgttcagaaggtgaaccgagtgtacgccacagcggacgagagatacggaaaaatcttcaaggtgaaagccgaggacgattccgaagcgaaaatagattctctcccggaacactgtatcatcgacaacgataacgagctgtccattgacgaggtagacagaagtttctacatcgcaatggcgaaaaagcgagttgacgatttcaagggtatcaaaccagaaaaaactaaaaagccaaggaggacaaagaaaatggcaactactaccaagaccacaaatgtatatcagaagctccttactgcaagggcaaagttccttgaagcgaacgtggagaagacaggaaagaatatgcacctgtccttcaaatacttcgagcttgaggacattgtaccgaccgctatccgcattttcaatgaggttggtcttatccctgtggtgaacttcaccgctgatgttgcaaccatgaacatcatcaacaccgacaacccggaggaatccgtaccgttcgttgctccgttcaatcagattgctcctatcgtgagcaacgctggcaaacaggctacaaacgaaatgcaagctctcggttcttccatcacctatatgcgccgttacctgtatatgattgcgctggacatttgcgagagcgattccattgacgcaaatctcggcaatggcgagactgcttccgctccggcggcagagaagaaagccccggctactcccgagcagagacaggaagtgaaggagaatctgactgctccggctgacaatgcttctgctttacagattaagggtctgaaagctgttctcaagaagctcaaggacgctgacccgagcaaggaggaactgattgcgaacatcgcagtacagaccaagggattcacggagatttccaagtccgattgcgagacgctgattcagaagattaccgcaatgctggaaggaggggctaagtaatggcagacattaagtggctcgagggcaatcgtattcagattgcccctcccaagagaaccaagaaaatcacaggtactcgcttcgctactatcctcggtctgaatccgtggagtaccgcatttgaaatgtggtgtgcgattaccaagacctatgagaagcccttcgaggacactatctacacggttgctggtaagaccatcgagccgaaacaggctcgctacatggagcagtcctacggtatggacattgttcgcccttccgatgtgtggggtgaggactacttcaataagacatggggagatttcttcacggagagcaaacacctcggcggtatgtgggactatctgatgaagggtgaagacggcaagaccatcgaagctgttctcgaaatgaagaccaccaaacgtgcggaggactggcagaacgatgttcccgagtattacgcattacaggcggcattatacgcttacctatacggtgtggacgatgtgattatggtcgcttccttccttgacgagaaggactacaaagacccggcggcgtatcagccgaccgcaagcaacaccatcactgttgagttcaaggtctccgagcgttacccggacttcgcagacaaggtagccgctgttgagcagtggtgggctgattatgtcgatactggtatctccccggagtatgacgagaagaaggacgctgaaatccttgcggcactccgcaccaacaccctgtctcccgagactgacattgaagctctgattgcagaagccgaaggtctcaagaaggagctggacgagatttctgcttccacagcagacaaggagaagcgtctcaagaccatcaatgacattatcaaggaacacgctatggggcagttccgtgacggtgataagaaggtcgaggtcaagggttctacctatgtgtggactgtctctcgttccgagactaccagcgttgataaggacgctctgaaagctgacggcttgctggataagtacagcaagaaatctgaaacctaccgtatgacggttaaataaggaggataaattcatggcaaacagtaaggaactgaccgaacaggtcatggaactgcataagaagcagaccgaggaaatgaaagctctcgaggaacagcgtgaggaagctctcaaggttgagaagtacgatgaagccgctgtcgagcttcacaatatgtataacagctacattaaggctggtttcaccgaggaacaggcatggaagttgacggaaatcgtcttcaccaacagtacgaaaaaaggaattttttaaggaggacactacaatggcaagaatccctatgacgagcggttttgtaattatcccggagggagaatacgttttccgcatttatgacgcaacctatgacgaggatttcggtcgtatcgaaatcaagctggtaaacgcacagggcgcaacccacaccgagcgtttctctatcaaggataagaatgacgagtacaacgaaaaggctctgaacgctttctcctacttcgctaagacggctatgaacgattacacgatggaggacattgacccggaacagcttatcaatcactacattcgtgcagaggttgttcacaccaaagttccgagcaacaaagacccgaacaaggaagtcactttcgcaaacctcggggacaagtctccggcagatggtttcgataccgagcctgtcgctcgtgcgctcactctcggcagtggtaacaatgccgctccgaaagccgcacctaagacacagactgcttccgctccggctaagactggactggatattgacgcactgttgggttaagcaatcagccgggaggggcaagctcctctcccggatttttaataggaggtgtcgcatgacagataatgtcaatcacccggcacattatgagaccgggaaattcgagtgcattgaggtaatgctcgagacacagggcgtggaagccacgaaggacttctgtgtatgcaatgctctcaaatacatctaccgacacaggaataagaacggtgtcgaggacattaagaaagccgattggtacttgaagaagtatctcgaattggcgaaatcacaggaggaaaaagcatgacaatcaatgagtatcagaccgaagctctccgcactgcggctggcatgaaccacccgaacaatgacgagattctgctcaacggtgttatggggctttctggtgaatccggcgagtgtgtggacatggttaagaagtaccgcttccaaggtcacgagctggacaaagctcacctcgcaaaagagctgggcgatgtggcgtggtatctcgcagttaccgcccacgctatcggctacgacctcgagacggtgttgcagatgaacgtagacaagctccgcaaccgttacccgaatgggttcgagaaagagcgcagtcttcacagacaggagggtgacgtatgacactggcagaacgtattgagaagttcaataacctcatgggtgacattgttcccccggaggtcaagaaagacctgttggagaagggattcttcaccgctccggcaagcaccaagtatcacggcaattacgagggtggtttgttcgaccacagctacatggtagctcactacctcaagaagctcacggaggagtgccgtcttgactggcagaaccctcgctcacctctgctggttggtatgttccacgacctctgtaagatggacaactaccagcacccggtcattgctgaaactctcggcggcgaggaaatcagagacgatttcaagtgggaatacgctacggacactctgctcaagggtcacggtgataagtcggttatggtgctggcacagtatttcaagctcaccgaggaggaaatcatgtgtattcgctatcacatgggagctttctgcgataagtccgaatggaacgattatacacgagcagtgcataaatatacaaatgttctgtggacacaccaagccgatatgctcgcttctcatgtagagggggtgtgaggtatggtggcaagaatcccgaatttggagcttctgctctataaggcacaacaagctctcgcccatgacccggatttcgttcagaagattgccgagattaaggaaaacgagagccgcaagaaagtctacctcgatttcagcgttgagtgcttctcacagatttggggtagcacctgtaccgggttcgatgtgaccgaaactggtgagcctgttatggctggttcagctatgaccgaggaatacaccaccatcgtacatgagaagaccacagacacctactgtgtgttcttcggagaccgcccttgctacaaggtggataacccgagcaacgagttctatgaggacatgaagaagcgtcagatggcgagcctgtctcgagccaagaaccgctattaaggaggaatgagcgatgattaaatttgagaaacccgaggtatggggctgggaacacgctatccgaggaatgagaaaccccctcaatagctgggagcgctccgacagctacccggcggttgactgcggcaagtgtggaatcatcgaccgagaaggtatctgtcacccgaaggagcatgactgtactccgtatgagtgctatgcaatcggtgacaacgataaagaccttatgacccggctcattcgtggcggcgcacctcaccgcaagttcctccgtcagattttcgtatcggtggatattaccgctcctctctactggtggaaggagttcgatacatacaaggtcggcacgacagcgaatagctgttccaccatgcacaagatacaggcaaaggagttcaccttcgaggacttctcctgtgagcatttggacgagccgagcaaggcgattctcggtgttgtgattaacgagcttaacaacaatcgtggctggtacaacgattacaacaggctcgtgagtgagggtgatttcaccgatgttgagcgtaagcagttttggtggaacatgattcagcttttaccctcctctttcaatcagaagcgaacggtcactatgacctacgaaaaccttctgaatatgctggaatatcgcagaggtcacaagctggacgagtggcgtatgttctgcgattggattctcaccctcccttatggttcgctcttgaaggaaggtgtgggtaatgaacagagctgaacggcgtaggcagaagaaagccggaattaaggtacagaaagaacccactctgaatctgaaagtcagtgatttcgaccacatggtctctcatgcggagaagtcagccaaggaaagagcgacagcggcggcaatccacgaaatcgaccaacagattcttgagcatgacgaagcctattctctcgacattgacgcaatggtgctgtggacgcttcatgtttacctcgggttcggtaagaagcgtctcgagagattctaccgggatatgttgaaggaacacattcacatgagggaggtctacgaaatggacgatacctacccggaacgctacaaactcaaggagctttgcaatgtcgatgtggaagctctgaataacgaatttaaggaggttatacacaatgtataagttgaagaacgtcaacggcagagtgaacgctctgctccgcaccgggaaggacttcgtaaagaacaacctctccgtgtctgcggcacagcatatcattgacactggtaagctggtggaatctgacaacccggactaccctatctgcattgataaccagtggtatttcgagggtgtcgaggtcaaaaagacagcgaagaaagcccagttgagttccatgtatggggaaatgaaggagggcaagtaaatgagccgaactttctactccgagtatgtgaatcattgtctgcgattctatgctcgacacgacagaccgaagttccattcggaagcagacaagcataactgggtagcgtgtgacagcgcactcaagtcgttctccgataatgacagagcaatgcttctgtatatctatcgtgagggtgataccgtcccggacaatatctatcagttggcgaagtccaaaggtatctcacaggacagcatttggaagctcgtaaatgagctggaaagaaaggtggcaaagcggcgtggtttactatgacaatattcccgaggaattaaagaaactcgaccagtgggtgtgtgcgaatgatggaagcaaagtccccatgaaagcatgggagaacgaagccgcttcctccacaaacccggaaacatggtctgatttcgagactgctctcgaatcgtacaaccagcactattacgactactgtggtttcgtgtttgcggacaatgggtatgtcgggattgatattgacgaggggtacgatgaagacggtcttatgagcgtcctcggggctgatattgtcggtaagtgccacagctatacggagaaatcccggagtgggcgtggattccatatcctactccgtggaactctccccttcaaaggcaagaacaatcttgctggcgtggagatttacaaggcggctcgctacttcattatgactgggaacacccttctctaccgagaaatcatcgagaaccaagaagcgattgattatgtggtggagaaatacttcccggaagctcgagagacctcggataaggtggttgttgggcgagacaagatatacgccccggtatgggaagaacctgtcgtaaatgggcgtgtaaagctccgtccagtatatccaagaatcccggacggaagccgcaatatctgtctcacctccctcgctggtatgctccacaatcaaggctattccaagtcacagatttacgaggagctgttgtacgccaatacggttgcctgtgacccacctcttgataggaacgaactgcgaactatctgcaacagcgtcacgaggtacaagcgatgaagattaaatgctgtaaggactgcgttgctccgaagcgacaccccggctgtcacggtgtatgccccgagtacctatacgaaaaggcactgtgggaggaagaaaagaaagtcattcgtgaggagcataggcgattcagtgagctatacgagcaacgctccgagggagtgcgaaaagcacttaaacatagaagacgataacttgcacggaaaagataaaaatttatcttttaggtattgacattcaatcttgtatgtgttatcttataatcacagcaagacaaaaacttatccaataaagattaaggaggattttattatggaagttatgagaaacatgactattgacactgaactgtttgaactgggagacattatctccttcacactcaccacaggggaaaaggttaaggcgaaagccattcgtgagaccccgaacggtatgttgttcatcactgttgactgtctcaaggacgagcagaaaatgttcgagaatcccggcagagccgaaaaggttgactacgaacattccgaccttcgcaagaagctgaacggagaaatcttcgagagcttcccggaggaaatcaagggtcgcatggttggtatgcgagtaggtcagacgaactgctttgatatgctccgtattcctactgagcgtgaaatcttcggagagaacccttacggcaaggacgagcctgtatctgtgagacgcttctacggcatggagaaccgccgtgagcgtatcgctttccaaggctcggagacaggtacatgggaatggtactggttgcagaataaggttgaagattccgcttccgctttcgcccttgtcggcggcaccggatttgcggactaccacgacgcttcctattctattggcgttcgcccggtctttctcttatcctaaaatctcgcccccttgtggggcgagttcaataaagaacggaggtaaatgtcgtgcagacaagatgtgaagactgtaagaaaagatgtgtctgccacgcttgccctctacataatcaatgccgctacgctttgaggtgcaaatcctcaaagtgttactgcggaaaatataggaggttatcagaaaatggaacagaacaaaatctgtcctctcctcacgactaacactgtcgtagacgagaataacaccgtgaaaattggcacacagcctgttttctgcgtaaccgagcagtgttcgtggtggttggaggacaaacagaaatgtgcaatcgcagttatgggaggtaagaaataatggcatattacatgaataagagcgtcccggcgaagcgaggagatattttctacatttccaactccaagtgctacgccacagacccgagtaatacagagggaagaccagcaatcgttgtctcctctgataaattgaatgaacacgcagatgttgtcgaggtggtctatctcaccaccaaggaaaagcgtctcatgcctactcatgcagaggtgctgtgcaagattccttcaaccgctctgtatgagaccatctacacggtcaataaggacaggctgggagatttcgtccgtacctgtaccgataaggaaatggagggtgtcaatgctggaatcctctgctcactcggtatcgccgctcctgtggtcgatggtgagcctgttgacaactctgtaacggtcgagaggaatctttacaagcacctttacgaagaccttctcaataaggtaatggcgaggtgatggatatgggtaaaggagctgatatgagctgggaagacattcagaatgagttcgacattatgaaccgaatgtcgtgccgcccggttgggttgcaaaaagtccccggcaatcatattttcgatgaagaccagtctgtgaaatggaacagagaacaggtcgaattgaataacaagaagtatcagagtgaagtcgctcggctcaacaccgagaagaacaaggctcgagattccgtctacaatctgattatcgaaaagattcagtatgaagtgggtcacaggctctctcgcaagaaagcggaagccatttggaatcgtgcctatgaggacggacactctttcggattctatgaaatcagttgccgcctgtcagaccttattgatttggcgattactctgctgggaggtgataagtaatgcaagagcttttcgagacacgcaacggtcgtgtcattatggacgaggacttatcctcgaagatgtatctgattaagcagtatcaccccgagaaagcagacgagaccagctccgggtttgagtggtctgaaatgggtatggcaaacctgtttggcttgctctattctcacgaagctcgctactgcccggaacacaagagctggtacacctatcacgagggggcatggcgtaaggacgagggagcaattctcgtgtccgagaagattaaagatttcgttcgtttgatgattctctactgcggagaaatcgaggacgatgatacccgaaagtcctacaccgggttcgtcaataagatgggtgacaggcgtatgcgagatagaatcctcaaggacgcaacaggtgagcttcgtatctctgctgtgcagtttgacgcagacccctatctcattaactgtctcaatggtacatacgaccttcgagacttctccttccgggaacatagctgggacgattttctcaccatgcagacagcatttagccacactatctccaagacggttaagtgtaaacgctgggagacgttcattaaagaggtcacacagaatgacgaggacaaggcagacttccttcaaagagctttgggttattccatgctgggtatgagcaatgaggaatgtatgttcattcttcatggtaagaccactcgtaacggtaagtctactctgctcaacaccattgagactatgctcggtgactatgccaaggttgccccggtcggtatgatttgccgtggagaccgtcagaaggacgcagaagccgccagccctaccctcgccgggttgaagggcaaacgcttcgtcacaatgtccgagagcaacgaatacggcaaactggacgaggagaaaatcaaacagcttacaggcggtgaagaaatctctgctcgtgcgctgtaccagtcggcaatcacattcaagccgcagttcaccttatggctttcctgtaacgaccttccgatggtaacggacaagtctctgttcgcttccgagcgtatcaaggtggtagagttcaaccgccacttctccccggaggaacaggatactcacctcaaggacgagctgtgtgagcagtccagcatgagcggcattttcatgtggctggtgcgtgggtatatccactacaaggaacgtggacttgcaatgagcggtagtctgaaatcggttgtcaccaagtacgagcgtgataatgacctcgtattgcagttcctcgagaaccgctgtgagcgtgtctcggaggaaagttcaccaaccgttatcaaggcgaaagacctgtacaacgctttcaagatttgggcgaagtccgagggtgcttatatcctgtcggctcgtaagttcaattctgaaatggagcgtcacccggagtggttcgacaggaaatcgacctcgagcggctatgcaacctattgtggtctgaaattgaaggaggtgctgtaatgagcgacttaaagatttttactgataacatcgagcctacggctctgaatcagatttatacccttgtcaaacaaccagctttcgcagattgcaaggttcgtatcatgcccgatgttcatgctggggctggttgtgtcattggctttacggctgatttgggggataaggtcattccgaacatcgttggcgttgacattggttgcggtatgctgaccgtggaactgggtaagattgacattgacttcgattatctcgacaaggctatccgggagaacgtcccaagtggtcgtggagtaaacgagacggctatctaccctaccgaggtaattgaatacattcggtgctataaggcactcaaagacccggaacgactggttcgctccatcggttctctcggtggtggaaaccacttcatcgagattgatactgattccgaaggggtaaaatacctcgtgattcatactggtagccgcaatttgggaaaacaggttgccgaatactatcagaatcttgccattgaaaccatgcaaggtaaggacgaactcattgctatgcaaaagaaactgattgccgactataagaagcaagggcgtaaagcagagattcagaaagcgattgccgagcttcatagaaagttctccccgaaccctctcgggattccgaaggagctgtgctacctcactggaaagcaccgagaagattatctccacgacatgaaagcgtgtcagcattttgcggcaaccaaccgatatgaaatcgcaaatcgaatcgtcagcagtttgttcggaagtgacatcgcctactgggatttgccgatgttcgagaccgttcacaactacattgagtttggaacgaacatggttcgcaagggggctatctctgcgaaagctggtgaaaagctcatcattcctatcaatatgcgtgatggttgtatcatcggtatcggcaagggtaatgaggattggaactgttcagctcctcatggtgctggtcgagtaatgagccgcagtaaggcgaaagagctggtttctctcgaggagtatgaggattccatgaagggtatcttcaccacatctgtcagccgttccaccattgatgaaagtccgatggcttacaagacgatggaggaaatcattgccaatattgcggacacggtagaggtcgtgaacatcatcaagcctgtgtacaatttcaaggcaagcgaataaggaggacactgttatgaatatggtttgcaaatgcggcggcaaggagttcttcaccgaggaacacggcaatcagaccgggctttactgctccgcttgcggtaagtggcaaaaatggctcaagaaggacgagatacgacttttcaatcatagtgccaaggtagagaacgcttctctgttggaacgtctcaaggctcgtatcgaggagagtgcaatcaaggtatctaccgtcaaagctccgcacacctacatgaaagctgtcggcacgagggagcttgagaaaattctcgaggaggagttgggaaatgaagacacgaaatgacatacttgctgaatacgtccgcagtcgttaccccgagattgagaagaccttcgactttgccgcttactctgctggtgtagctcttaaagagttcggcagatgtatcaaagaagcgttcggaggtactggtaaggaggtagacgatgtttgcgattcagaacattaagaccgggaagtttttgtatggcacagactaccgataccaccctcctcaccagcgtaccagcaacacgaaaatgctcacttacagctctatcgcagaagccgcacacgacttttgggttaagaggaagtgcggcaaagattacagaatcgttgtgctgaaatcggtggaggttaagcgagtgattgactactacgagagcaaaaacttcatttaacacaaagcggataagtatttatcaaaaacgacatttaccaaactatctgaaaaggattgaaaaacaatcttttcataagaacgagttattcttattattacagtagttaaagtagctgttctcaaggtattgcgtgtaacttcctttatatagaaaaatccctatatatagaagttatacgcaaaaaccgattttcaactacttctactactgcaataagaataagaagaaaggagaccgaaatggatatagataaactgttagcagacagttccgaggagactgttgcgactaaggagactgtttccagcgaggagaatgtcggaacgaaagccgttgcgactactggaaagaaagaaacgaagcctaagaagaaaggcaaaccgaggggtggtaactctcctgtgattggtacgaatgggttcaaccttgacgctggggataatgcgaagttcttgagtgtcaacatggcactgttcaatatgccaaacattgatatggaaagcgaatcggaggttcagcaacgactttccgactattttgcgttgtatgcgaacgctgatatgaaaccgactgttgctggtatggctatggcgttgaatggcatgagtagacagacgttgtgggctattacacatgacgctccgttgggtgggcgtggaaattatagcacgttgccgccgagcgtgactgacaccattaaaaaggcgtactttttgctcgaaaatttgtgggaatcctacatgaactccggcaaagtcaacccggtagctggtatcttcctcggcaagaacaactatggctaccaagacaagaccgagtacgttctcacgccgaaccagcagaacgacaacgactattccgctgatgaaatcagagaacgctacattgcaagcgaccagcagaagcgactttcagcaagcaactctgacgaggacacaagcgactaagcgactttcgcccacgctccgactttccgactatcagccgagcgactttcgactatcgactttcgactatgaaactgctccgggatttcccggggctttttctatgcaaaaattcacggaaattttcagaaaatcagccggacacggcactcacctctttatcgttttagcgtaataaagcaaaatgcactccgggcggcgtgggtgaacgtgtccggcggcgttccttccatataatgcgaattttgcgccccggtgtaattcgtaaatttagaatttatgtgttgacaattcgcataataagaattagaataacaataacaacacaaacaagataaaccgccaacacgaaaaagataaatttttatctgaaagtattgacaaacaatcttgaaagtgctattgtatagtcatagcaagacaagaaataacacaaacaagataaacggaggtaaacaaaatgaaagattatagaaagtttaagtacaccaacgaaaattatttgattttccgcactattgaaacatttagtagaacggcaagcggcaaaagctggaaaagccgccccgatgaagtggaaaacgaaattgtaccgcctaaacattatgaaaattatgtaacggctattccgttctttaacaatttcggagacggtgcaagttgtcgggcggcgttcagctataacgccccgggatatttaccaacacgcattataacggtttcaccgttcagagaaacgaaaaaagttgcttgtttttggtttttcaagaaagaaacattgctgttaaatgccggataccgggaaaaatccattgtagaaaatgcaaaacggtttcgggttgaatatgtagacggcgcaaaaatgatttatttttacaccgatgaagacggagacacggcaagcggcatttttgacacacgccggaatatttggagggggtaaacattatgagaaaatacagctttacgaacaacggcaaaacgtgggaacgtatcacgaaaaagcaagcccgggcggcttataacaacggtttaaccgttctgttttgcccggtgaatatgcgcccctttacgccgtggcatttagaaattgacgtaaacaaaaattttgaaggttataacggcattacttttgaaaaagccgtaaacgcttttgaaatttataattgtaccgacaacgaaaccgggcattatacggcgttttatatcccggttgtaacggttgatagattcaccggggaaacgcccacggcgtacacgttgggaacggtcaaacaatatgattatagcgttatggagggctgaaaaatgaaaaggtttgaaagtttgtgcaatgaataccgggaaaataagcgtttaattgaagaattgcaagcgatgaacgattctataaaatcggatattcttgcaatcatgggaaacgatgaaatgcacgttgaaggggcggcaaaagccactaataaaacggttgtttcaagtcgttttgattcaagcggattcaaaaaagaatacccggaattatttacggaatacagccgggaaacaagttataaacgcttttgcgttctgtaaagggggttatattatgcgtaaagtgtccgcaacggttatttataaagataatacgctttataatctaacggtcaatcataaaggggtttttattccgttggttgcatacgatgaaataagcgtaaaacacccatacgaaaaacgcacgtttcaaacaatgtataaatcagtattaaacatactgaaaaacaataatttctattgcgcttattatgagcaattcgggcggcgttggtataatattcaatttatcaatttagaaaacccggtaaatattaaaaaattcggaatggaggtgtaaagaattgataatattgtgtattctgatttttccgttagttgtgttagctgatttactgaaaatgaataaatgattttacagccccggttatatgccggggctttttttgtgcgtgtaccgccgcccggtaaaagtaaaatataatcaagaatagccgcccggggtgtgcgtggcaagccttgaacgcttgtgaacgtgtcccgggcttgtgtcgttcgtgggcgtgggtgcattgtgtccggcgttcatcgtgtccggcggcgtgggttgttcggttgttcgtgtcgttgtgtccggcttgcgttgtgggggcgttgtggggcgtttcccgggggcttttgttcgttggtgtatgtttgtatgggttcaccgtttcccgggcttgtggcgacgttttcggggcttgtgggtacacccccggagggggattgacaaggggcgaaaccgggcgagggagtacgctgaatattctcaaaaaataaaaagaccctacaaaagataatttcttatcctatcagtgttgacaatctccctttctcgtgctatactcgtatcacaaacaacatataggaggtcaaaatatggttaagaataacattgaagttgatgtaaaggtgaagctcctcgaagcggggaagacacaacagcagttgggtgaagaaatcggcactactggacagtacatcaaccgagttctcaagaagaatggtggaatcgtgaacgataccttcgtgaaaatgatggacgctctcggttataacatcgttctcacctacgaaaagaaggattgaagtagttaaagtagctgaaaacagcattttgcgtgtaacttcctctatatacgcgcgtactaagcaaaagttaccgcaatttttgattttctactacttttactacttgaggaggtgaatatctcgtgaaagcgattggttatatccgtgtatctacggaggaacagtctgcggacgataaatacggtatcgaggtacagaaacaggcgatttcagattatgccaacagaaatgattttgaaatcgtgtgctggctgacagatacaatcagcggtgcgaaggacaatcgcccggaactggacaagattctctacaatgcagaccagctcccggcacatgaagccgtgattgtgttcaagaatgaccgtgttgctcgtgacacaaaattgtatttctattacttctacacgctcgagaagcggaacgtgaagctgttgtctaccgaggagcatttttcggagggtgacgatttcgccaatatctaccgctctctgctgatgttcgttgcggaacaggagcgaaagaacatcgctctgcgtaccgggcgtggacggtctctcaaggctcaatgtggtgggtattccggcggcaacaagccgtatggttattactgcgtagacggtatgctcatgcagaacccggaagaacgacctatcgtggagacggtattccgagagcatgacgagaatcacacctctttgctggacatttgcgagattctgtacgatggtgggtatcgaactcgaaaaggcaagagatttcagccgtccaccattcgaggaatcctatctaatcgccccttctatgaaggcaagtacaaatatggagacatgggctgggtacagggcgtacactccccgattctcccattggaggtgtagaaatgaagaaaatgctatctattatgcttgccggagtgcttatgctggcggtctccgggtgtggagctgaaccacaacacaaggtctcgtatgtcagcggagaaaaactcactgttctcgagcagtacgattgtgtggctgtctatacgcagtacaccaacgacagctccgaaactgctgtcccggctgatgaagtgtcggtcaaagcatttcagaacggtgtcgaattgtcaccgcttgtcccgacaggtgacagaaccaacggttatgtgcagtgcgattccagcgtacagagcggcacgaccgctgatgtggtgtggctattcgagcttgacgatgattctaccgtatcggtggagctgtccggcggcgagaaggtcgaaatcccattgacggaggaatgagcctatgtgggtgctggcaatattgatatttccctttgcggtactctatgagattgtgaaaatgaatgagcagtctcaccaccgagggaaacgaaaacgaagaaaaagattttaatgacgagggtgcgttatcgcacagagatttaattctctgaacggtgacgcactctctttttgtttggaggtatttatgaaagagttacttgaaaaaattctcgggcaaatcaaaaagaccccggaaggggtcagagcctatgaggatttataccatatctgtctcgagacacagaagacagacattcccctatccgtggagtatctgaaaaagctgtcagacattatcgagaatcggattccgcagtctgaaacagacaaggagcttcgctccctgttcatgcttcacaagaaggttttgcttgccgccgctccattcgattttgaaagctatctactctatgtcgaatgggaacgtgagccggacaagaagttctatgtccctcgccgtgaggtcatgcaccctgtcgtacaggcaatgcaagatttgattgacgataggctggatttacttacgatttccatgccgcccggtactggtaagtccactctcggtatcttcttcctgtcgtgggtcatgggtcgattcccggattcacagtcccttgcttctgctcactcgggtatgctgacacgctccttctatgatggtgtgtatcagattatcaccgacagcgagtacctttgggctgatgtgttcccgggagtaaaaatggcggcaacgaactccaaggaggaaaccattgaccttcacaagaagcaccgattctctacactcacctgtcgagcaatcaatgcttcactgactggtgctacccgatgtgacaaaatcctctacgccgatgacttgtgttccggcattgaggaagctatgagtaaggagcgattggataagctgtggagtgcctacaccaatgaccttaaatctcgaaaaaaggaaggtgcgaaggaaattcatatcgctacccgatggtctgtccatgatgttatcggtcgattggagaatcagtacggtggtgattcccgagcgaagtttattgtccttccggcactggacgcagacggtgagagtaatttcaattacacctacggtgtcggattcagccgtaactatttcgaggatatgaggaacaaccttgatgaagcgtctttcaaggctctgtttatgaatcagcctatcgagcgtgagggtctgctctacgatgtggacgaactgcgccgctacttcgagcttccggcagaagacccggacgctattatcggtatctgtgataccaaggacaagggttctgactacgctttcctcccggcggcgtatgtgtacggcaatgactactacattgacgattgcgtctgtgacaacagcttaccgaacatagttgacgctcgattggtggacatactgctccgctgtaaggtcaaaatgtgccgtttcgagagcaattccgctggtggtcgtgttgccgagaaggtacagaacgaggtcaagaagcgtggtggtatcactcgcattacgaccaagttcactactgccaataaggagacaaaaatcatcgtcaacagtgcgtgggtcaaggaacactgtctgttcaaagacgatagcctgtataaacgtcagagtgattatggtcgcatgatggatatgctcggctcttacactgtggctggtaaaaacaagcacgatgatgttcccgatggtatggctatgctggcagagttcgcacaaagtctgtccggcgcaagggttgaggtatttcagagaccgtggtaacacaggtcgtatgagttatccacactttccacataattatcaacatatagtgtgttagcgtattgacttctactatatcttgtggtattatgatatagtaagaagaacgagtttgaatgggtgcatgattgcacgaggtaatttagacctcaagcagtcatgcacccattttttgtatgcagaaaggaggaaggaacgtggcacatcaaattgacgagagcaagccgaagtatctaagtcagacacgatttatgagcggtcggcgcattatcaagaccagcgtaacagaaatcacggacgaaaacgtggtcgatgttctccgtaaggctctcgctactcacgagttgaaccgcagtgagattgactacctgtggaagtattaccgtggagaccagccaatcagaaaccgtgtcaaagacgttcgccccgaaatctgcaataagattaccgaaaatcgtgcaaacgaaatcgtgtcctttaaggttgggtatctgtgtggcgagccgattcagtatgtcagccgtaatggtggcgaggaaatcgtaaagcagattaacaccctcaacgagtatatgttcgcagaggacaaagccgctcaagaccaagaacttgtcgagtggcagatgatttgtggtacggcgttccgtcttgtccttcccgatgaaccgggtgaggaagacgaagctccttttgagctttacactctcgacccgagagacaccttcgttgtgtattcaaacgaaatcggtaacaaaccgctgatggcggttaagtacagcaaggacgataacgagatttttcactactcgatttataccgagaatcgctattacctcgtggacggagacattttggtggaatccaaacctcatgccctcgacatgattccgattatcgagtacccgggaaacaatgctcgtctcggttcttttgagattgtgcttcctctactggacgcaatcaacaatgtggaaagtaaccgtatggacggtatggagcagttggtacaggcttttattaagttcattaactgtgacattaccaaggaggaatacgaggagttcttacagctcggcgcaatcaaggtgaagtctgtggacggacaagccgctgatgttggtgtagtcaccacagagctgaatcagacacaatcgcagaccctcaaggacgattactacaacgcaatgctcactatctgcggtatgccgaaccgtaacggcggttcttccacgagtgatactggttctgccgtgttgctccgtgatggttggtctgacgcagaagctcgagcaaaggacagcgagaatgtcttcaagcgagcagaaaagaaaatgctcaagctggttcttcgtatctgtcgagacctcggcggtctcacgctcaagttgagtgatattgatatgaagttcactcgccgtaactacgaagccattcagagtaaatctcaagtccttatctccatgcttcaagagcctaagattcacccacagttggcgttccagcatagcggaatgttctctgacgctgaatctgcttacaacatgagcatgaagtattacgaggagcaacaggagaaagccgctgaactggctaagaagaccactcccgatgattccggggacgatgataatgacccggacaataacgatatttaagcggtaagccgctgtgaatataggcagagaagccttaaatcgcaatagtcagagaagacttaaaccgcaaacattgtcacagaagacattaaaagacaggaggatttcaacatggcaaagattgacattagcaagattgacggctatgccgacatgaccccggaacagaaaatcgccgctcttgaagcgtttgagaccgaagaccccgattacagcggatatgtaaagaaggatattttcgataagacagcttccgagcttgcggctaagaagaaggagctgaatgaaaagctcaccgaggacgagcagaaaaagcagaaggaacaggaggaacgtgaggagttacagtccaagtacgacaaactgctccgtgaaagcgaagtttccaagttcaaggcgaagttgctcggcatgggttacgaggaaaagctggctgacgctaccgcagaagcaatggctgatggtgataccgagaaggtcttcgcaaatcagaagaaacatcttgagaatgtcgagaagaaggttcgtgcggaagcccttaaagatacaccgaaaccgaccccggacggagattccaagacaatgacccttgagaagctccgcaaaatgtctccacaggagcgttatgactattctgtgaagaatcccgaggactacaaagccctctacaccaataacgatacaggaggtaatgagtaatggctcataagatttatgacaatttctatctctccaacgaggtagaagaccagttcaattcccacctcgatttacagcagttctgtactgttgataactctctcgtgggtactgctggtatgaagcgcaagattaacgtctacaaggctaccgctggtacggagaagctgaaaatgggcgaaggtaacaccaagagcattgaggtttctttcaccccggaggagtacgagattcagctcgcacagaacaagttccagtattatgacgaacaggaaatgactgaccctatgctcgttcctgtcggcactcgtcacatgggtactgatatgttcaataccgtaaacggcgatgtgtacggcgagttcaagaaggctactatggtcgttcctactgcgaagattgacttcgccgcatttgtggacgctgttgccaatctgaacatcgaaagcactgacaatcagccggagaaggttgctccgcagactttcgctttcgtacacccgggcgatactgccgagcttcgtaagaacctcgcagaagacctcaagtatgtggaagcgttcgctcgtgctggctacatcggtactgttggcggcgtgaacatctacaccaagaaggacgctacgaagggtactatcgtggttgctactcgacaggcagttaccatcttcaataagaagggtgtcgaggttgagactgaccgtaacggcgatattcgtcagaacactatttggtctcgtaagtattaccttgcggctctgactgacgctaccaaggcagtcaagattttcaagggtactgctactgccactgcggacactacggtttccgagggcaaggtttactacgctaagaccgacaacggctacatcgttggtaagcctaagaccaacccgaagactgaaggtttctacgagattgcctaagtaaaggaggtggacaacatgaccgaggaagaaaagctgattgctctcaaagcgatggtcggtggttcggacagtgacgaagtgctgtccacctatctcaaactggctggtcgtaaaatcatcaatcgagcatatccgtatgattccagcgtaacggaagttccggcacagtatgacactctccaatgcgagattgccgcttatatgctgaacaagcgtggtgcggagggtcagacctctcattccgagaacggtatctcccgaagctatgaaaatgctgatattccttcctcaatgctcaaggtggttactcctcatgtgggggtgattaaatgagaatgatggaacgaaacaaaagcaaattcttctacgctctgtacaaagagaaagtccctaagacggacgaatacggaaatgttacaggggaatatgaaatcattcgagacaacccggtagagttctccgctaatatctctgccgccaagggtgaaacaagcacccgacagtttggagaaagcgagagctatgacaaggtaattgtcatggggacggacgctccccctattgacgagtacacagtgctatgggtcgataaaacgccacaggttgatgaaaccggggctttggttacgaacgatgatggtgaggtcattactcctcacgattatatcgtcaagaaggtagccaagagcttgaacagcgtatcggttgcgataagcaaggtgactgtcagtgggtagaaaagttatctcattcggattgtcaacgagtgaaatcaaccgagctatgaaagagctggctgattacaaacaagaaatccttagaaaaacagaactcctccgagagaaagtagccgagcggctggctgatgaagcgaaaagcggattcagcggtgcaatcgttgacgagcttattcttaaaggagggcaaacttctccacgatacgcacaagtcgatgtgtcggttgacaatcgagggtcggttactgtcgttgtcgcaagtggtgaagacgctgtgtgggttgagtttggtgctggtgtctatcataatggctctcccggttcgtcccctcaccctcacggtgcggaactgggaatgacaatcggtggattcggtaagggtaacggcaagaaagaagtttggggattctacgaaaatggcgaattgaagctgtctcgtggtactccggctcgtatgccgatggctcttgcaatcaccaccgtttgtaatgatattcagtctatcgcaaaggaggtgttcgggtgattgacattgagacagaggtattcagtatcgtgtccgcagaggtgcgaaagaaatacccgaaaatctatatgactggcgaatatgtcaagtctccaccttccttcccttgtgtctctctcattgagacagacaatcaagtttatcgaaacactcgagattccgggtgtatcgaaaaccacgcacaggtgctttacgaggtcaatgtctactctaacaaaacgagtggtaagaagactgaatgtaaagcaatcatcgctctcattgattccaaaatggaagcactcggtttcacacgaacccttatgaaccctgttcccaacgaggaagacgcaacgatttacagaatggtggctcgatacagggctatcgtctctaaaaacaaaactatttataggaggtaaacaagcatggctattagcacttacaagatttttctcatgcagaagaacacttccgcatgggagaagctgattgacattaaggagtttcccgacctcggcggtgcgccggaaatgctggaaactaccactctgtctgacaaaatgcagacttacattccgggtattcagtccctcgattctcttgagttcactgcgaactacactctcgaggagtacaagaagctgaaagcactggaaggtacggagaaggagttcgccgtttggttcggtggtacggaagttggcgataccgtcactcctactggtaacagcggtaagttcaagttcaaaggctctctgtctgtttatgctaacggcggcggcacgaatgaggttgtcgaaatgactatcactatcgctccgtctactgttatcagcatggacgcagagtaaggaaaaaataaggaggataaatcatcatggcaaagcagttgaaattcactttcaaggataaagaatatgtccttgagttcactcgcagaacggttacggaaatggagaagaagggcttcgttgcggcagaggtcgagaacaagcctatgtctactctcccggcactgtttgaaggtgcgttcctcgcacatcatcgtttcgagaagaaggaagttatcaacgaaatcttctcccacatgacgaacaaggaggagcttatcggtaagctggcagaaatgtacaacgagccgattatggcactggtcgaagaacccgaggaatccgagggaaacgtaagctggacagcgagttggtaagtgattcgctgttgacagatgaatccgctaacaaggggagcgagcgtgagaatcgctctgctcccccttcttattcggagatttttctcgcaaagttcccctattacttatcaataggcatgacggaagaacaatactgggatagagattccactctcgtgaagtcctaccgcaaagcggaggagcttcgcaaagagagggtcaatcaagaaatgtggttacagggtatgtacatctatgacgctatttctcgtctgtctccgattcttcgtgctttcgccaaaaagggaacgaaagcccaaccttatgtcgaggaagcatatcccatcaataaaaagacggtggaggaagcagaactcaagaaggaaaaggctaagtctgaaaagggtctgcgctatatgcaagcgtatatggtacaggcaaataagcagttacaagaaaggaagtgagttttatgcctactacaatcgaacaactcgaattggaagttcagtcgagttccacctcggctgtcgctggtatagacgctctttccgcttctttgtccaaactcaaaaatgcagttaggggcggtgtcggattaacaagcgttgcaaatcaagtacgcaatctcgataccgcccttaaaagcatggatagttccggggcagacaagattgacaagctcgcttccagtttggaaaaactgaaaggtctcggcagtctcaagatttcgtcttccatcggaaatcagcttcaaaatatcggaagtgccgccgcttccctcactggtgtagatttcagtgctatggagaagctgggtacagcacttcaaccgttgaacaatctgaacgcttccgggctaaagtccactatcaatgcgctcaataagttaccgaagctggcagacaccctcgacaacatggatatgactaagttcaccagtcagattcagcagttgtctacggctctcgctccgctgacaaatcagctcaatgctgtaactacggcgttcaatcgtcttcctacgaacattcagagagctattaccgtcacgaacagaatctcgcaagagaacaataaggcggcaaatagttacatgaatctgtatgccaaaatcaaaatggctatgggtgttgtgcgtactggtgcgagagtaatcgcttcgtggataacacagtccaaccagtacattgaggatttgaacctgtttaccgcttctatgggtaaatacgcagaggaagcacagaactacgcagaagcagtcagcgaagctctcggtatcgacccgggagagttcatgcgaaatcaaggtgtgttcaacaccatcattagcggtttcggcgtggcgagcgataaagcgtacctcatgtccaagaacctcacacagctcggctacgacatttcttcgttcttcaacatttcgtttgaggacgcaatgcagaagttacagtcgggtatctcgggtgaacttgagccgcttcgtagactgggttacgacctgtctgttgcaagactgcaagaggaagctcttgctctcggtatcgagaaaaaggtctctgctatgacacaggctgaaaagtcgcagttgcgttactacgcaattatgacacaggtaactaccgctcaaggtgatatggctcgtactctgaacgctccggcgaaccagcttcgtgttttacaggcacaggttacgcagtgtgcaagagctttgggtaatatctttatcccggctctgaacgcagtattaccgtatgcaatcgctttggcgaagattgtccgtatgctggcaaactctatcgcaagtctgttcggattcaaactcccggaggtagattattccggcatttctgctggtgcttctgcggttggcgatttggctgacaatgctggggacgcttccgatggactgggtaaagccgggaaagcggctaagaagctgaaaaatgctctgctcggtattgacgagctgaacgtcctgtctaaagacgatagttccagtggaagcggtagcggctcgggtgctggtatcggtggtggggatttaggcattgaccttcctacctacgatttcctcggtgacgtaatcacttctaaggttgacgaaatcgttcagatgattaaggacgctatgtgggaaatcactgctgttatcagcggattcttactggcaatcggtactatccttgttgtcactggtgcgaacattcctctcggtctcggtcttatggctgttggtgctgtcggtttggcggcttcggtaatggcaaactggaacggaatgtcggaacggttggcgaaggtacttaccctcgttaccggggtactgggcggcttcctgttggctatcggtgctttccttgtattttcgggtgtcaatgtaccgctcggtgctggtctcatggtggctggtgcggcggctctcggtactgcggctgtaattaactggaagttcctcaacggagacctgtcgaacgctctgtccattctcacggcaatcgtgagcggtgcgttgctggctatgggtgcattgttcgcctttactggcgttgatgttcctctcggtatcgcattgatggcggctggtgctgtcggcatggttacagcaatcggtcttaactgggattcgatgtctgaccctctccgtaggacaatcggtatgctcgaaaccattgttggaggtgcattactgacattcggtgcaattctcgctctgactggtgtaaacgttcctctcggtgttgcgatgattgccgctggtgcggtttctgtcgcttcggcagtagctttgaactggaactccttaacaggtgatgttcaagaatccgtactaagcattgtggctatcgtgagcggtgctttaatcggtgtcggtgcaatcctcgctctgacaggagttgcaaccgggctgggtattgcgatgattgccgctggtgctgtcggtcttgccgcaacggtcggtttgaattggaatagtatgccggacaatatcagaaaggttactacgaagattcttctcattgctggggcggcttccattgccataggtatgattctcgctttcacaggagttgcaactcctctcggcgtaggtcttatcctcgctggtgcggcggctctcggtacggctgtggctcttaactgggacactttgacaaacaagctaaagggcgtaactactaaaatacttgctatcgctggggcggcggctcttgcaatcggtattatcctgtgcttcaccggggttggtattcctctcggtgttggattgatattatcgggtgcggcggctctcggtacagcagtagctattaactgggaaaccatcaaagaaaaaatcaagggagtttttaccaagattaaatcaatggctggttctctcggcaaactcgctatcggtctcatgctgtgtctgacaggtgttggtattcctctcggtcttgctctcattgcagatggggtcaaagacttcgctactggaaaacctgttagctggggttcgatggtgagcggaattaaggaagctctcggaaatatatctgacgagtggaacaaattcaaaaagaaggttaagaacagcaagcctgttcaattccttgccgaagtaaagaacaatgcttcggaatggtgggacaacgtaaagggttggtggtctgataagacgaaagacggtctctctcttgaaactggcgtaaagctcgtaaaagatggctggtcttctgtgaagaactggattggtaacattccggctgtgaaacagggtgtcgggcttctgaaatccggctggtctaccgtgaaaaactggataggcaacattcctaccgtagaccaagctgtcgcactcgcaaagagtggctggcagacggtcaagggctggattggcaatatcccgggagtatcgcaagcagtaagtcttgcgaaatccggctggaactctgtaagagagtgggtcggtaatatcccggttgtcagtcaaggaatctcgttgctgaaatccggctggacaacggttaaaaactgggtcggcaatattcctaccctgtcccaagcaatcaatctcattaagagcggttggcagacagtaaagggttggattggtaacattcctactctgtcccaagcaatcagccttatcaagagtggttggactacggttaagaattggattggaaatatcccggttctttctcaaggtatcagcttactcaagtcgggttggactacggttaaaaactggattggtaacattcctacgctttcgcaaggaatctcgttgctgaaatccggctggtctaccgtaaagaactggattggtagtcttcctgttatcgctcaaggtatttcgcttttcaagtccgggtggacaacaattaagaactggattggtagtcacaccgtaggtgtcggtatctctctatggaaaaacggttggagttctatctcgagcttcgttggtacttcggtatctgtcggtatctcgcttttcaaatccggctggacttctattaagaagttcttcggactggcgaacggcggtatcgttggtgcgaacggcggagtgaagatgttcgcttccggcggtatcatcactccgaatatgtggaaagcaatgccgaaatatgctggcggcacgaaccgagcgcatggctctatgttcgttgctggtgagagcggtgcggagttggtaggtcatgtaaatggcactaccgaggtgctgaaccgattccagcttgcttctgtcatgcacagctccatcgtgagcggcatggcacagttctccgggtactggcagtccatgtctcgagacattgtgacttgtgcgaacggtattatcaatgccgttgtcgtaagtaccgccggaatcaacgataacctcgtgctggcttcggcaagcggttatgacccttataactcgctggcacagacggtgtacgaagattccaagaaatcctatgacggtgcatattccgatgattcgtggtctcgcaatatgcgtgagttctaccacgagtatgtcgagcctacactcaaggaaatcgctaccgataccaagagacaggcagacaagaaggaacagaccatcgtaaaggtcggcaaccgtacaatcaatgacgctgttaccacgcagaaggaagcgaacggtttcagcttcaccgagtaaaggaggtgtgtagcgatggcatatttagcgataaatggttatgagctaccaccttgtaaacgaggtgtgagcgtagtcgtaaccaccgtggttgacagcggacgagacgctaacggtgctgttgtaggtcaaagagttgggcgagaccagtacaagatagatgggcttgagtgggcgtggctcactgcggctcaatgggaacggattctctctatcttgagtaatttcttcgtctatgtcgaatttaatgaccctgtaacaaataaacgcaaaaccgtaagaatgtactgcggagaccgtacaggagaaccctactgggtgacagaagacggtactccaacgcattatcggaattgcaaggtaaatcttatcgacactggcgagtaaaggaggggttttatgcagaaagtatcgaaagcatacaaagaaagcatgaagtcctctctccgtgagagagcatacattatgatttctttcggacttgtgaaccaagaagcacaggcgaaagctacggtcgataatggcagttatgcctactactcgaacaaggacaatatcttcggagagcatattgacgatacggtctatgccactctcgaggaggagttcacgaaagtagatggctctatgttctttctccctcgggctaccgagggagggagatactatgataccgggattgtctcggacaagctggtttccgaagctcgatgtgaagtaattatcagcttgaacacaatcgcaacggatttcaagggtctcacgattaacttcggtgagaattacccggttgatttcgatattgtcggaagtaccgggcagaccattgagtttagagggaatacaaaatcaaagtggagtaccgaggaagtattggaaaatacaacctatatcaagctggtgttctacaagatgaagaaccctcaaagccgtttgcgtatctactctatcatgttcggttacggacttgtgtattacaacgattctgttatgagttctgctcttgacagttacgtttcccctatcggagctgatgttccgcagttcgatttttcggtaacgctgaaaaactacgaccactacttcaatgtggataacccgaactcggctatcaactacctcgagacaggacaggaaatggatattatgtacggttatcagaccccgggttctgacactatcgagtggattcaaggaaaccacctgtggtgttctgaatgggaaagtgacgataacacggctacaatccgttgccaagacattttccgcaacatggacggcgagtatgtgaagggtctgtatagtgccgctggtaaaagctactacgcactggcagaggagattttgaaggacgctgggatttccgagtattatatcgacccacgtttgaagaagctctactctaacaacccgattccgagagtgaaatacaaagaagcattgcagattatcgcaaatgcctgtcgatgtgttctcacccagtctcgagacggcaaggttcaaatcaagtcgaatttcatgccgagtgcttccatcgcaaccaacggcgaggagacctactccaatgccgcaaacgtgctgacggacacaccgaaggtcgaatatgcaaccctcgccgggaattatacccctaccgatgggacgatgttcttccttccgagaaacggcaaggcggctctgacaaccgggtatgtctcgaaggaaatctccggggcaaacggaacattcacaaagaatcctgtcgttactatcacgatggaagcgattcgagcttattacggtttgaagctggtcttcggtacagctctcccggcggcgttcacaatcagaacgtacaagggtggcgagcctgtaaatgaatacccggttgagaaagacgaaatcaacaccacttcgattattcttcgagatttcgatgatttcgatgtgatgaagattgagttcacaaaaaccgcagagccgtacaaccgtatcgtactgaattatttcagtttgagcgatgttgtggatttcaccatgaatcgccgggacatgacctcctccccgaaagctatcaaacaggagcttatcaaagaggttatcgtcccatgttacacctaccaagagaataatctagaagaaaaccttgtctatgaggacatagatgtagtcgctggtgaggtcgagacttattacattcaagacccttcctatggttataaggtgaagctcgatgaagtcgaaggtaaggcaaccgtagtggcatggagtaactacttcgttaccatcaaattcaatgtcactggctcgttcaagctcgaggtacagggttatcggtacaaaatcgttgagaagtacgctacggtgtctctcaatgctcgtggtaagacagtcaagtggaagaatcctctgataagtaataccacgatggcgaatgagcttgccgcatggctggctgattactacacagccggaatcgagtacgaatacgatactcgaggaaatcccgagctggacgctaccgacattgtgtatcaagaaaacgagtttcacgatggtatgagggtaaatatctaccgtcacactgtcaatttcaagcaagcattttcgggtcgagtaaccgcccgaaggattggaggttaaaatgtcgtggtctacaccgaaaaccgattggaacggtgagactgtcgatggtgtttacaccggggacagattcaacgccgtggacttcaatcgaattaagaacaacctcgaatacctccgtgagttggctatcaagatgtatgacgagttcgctattcagtctgtcggaagcgataagaccgtaaaggactacttctatgctgatgaaatcaatgcactggaagcgaacctcgttaccatcaatacccacagtctcaagaggtcttacggcactgctcctacctatgccgccaatggtaatacgatggatttcaaagaactcaatcgtttggagggagcaatccttgacctttacgacaggctcaccaatgagagtgagggaaggaggacattcacatggaattttggtatgaagggagggttataaatggcgtggaaattacttcctactgattatacggacgctgtttggagtggtctgaaaagatacacacaggtcgataactccgatggtacggtatcgttcaacgatgttacgacctacaccaataaggagaaatccttcttcggtgcgaaagacgctaaccgtatgaacgaagctctgaactacatcatgtctatgctggaaaacggcacgaacttgtatgaggagtttcagacctacttcaccacgcagaaggagcttttcaaaagctcgggtgatagttcttatcaagagctgacccagtatttcgtcaacctcaaggcacagggcgattcgtctttggcacaaatcgaaaagacctatgaggaacacatgactacctacgagggcgagcagactgcggcatttaacacatggtttgctagtatcaaaggtaagctgaacgaggatattgccggaagtctgcaaaatcagattaccgaagtagacgagcgtttggcggcactggaacacatgaccttgaagaaccttttcactgtacctgttgcgattgacaacactggtactacgcttcttgctgacgatttgggtaatgcaatcgtggcagattggaaatataaggaggaataaaaatgagtgcaatcagtattgaaaccaagaaagtgacggaactcacggcgttcaccgcaccgaccgattcgtgtctgattccgattcacgatggcacaggcttgaagaaaatcacctttgccaatttcagagccaaggcggttgagggtacggaagcgaaaatcgctcctctgctctttaacaacgccggggcgcacaatgcaatttaccgtggtaagtcgctgggtagcaccgtgactaccgcccagtatgccgctatcaaggctggtacattcgatgatttatacatcggtgactactggactatcggcggtgtcaactaccgtattgcggcgttcgattactacctcaacagtggtgatacgaactgtactacccaccatgtagttatcgtgccggacacttgcctgtacaacgcacaaatgcacaacaccagctccggcggttgggaaagcggtgcggcaaatactacggctggcggctatgtcggctcggatatgtacaagagcaatctcgaacaggctaagaccactatcaagagtgcgttcagcggtcatgttctgaaacacagaatctatctgacgaacgctgttgcgaatggtcgtgcttccggcggcgcatggtgcgattccgaagttgaccttatgtgcgagcagatggtctacggcagtggtattttctcccctgtttctgacggtagcaatgtcccggctaactaccgtgtcgagaaatcccagttgccgctgttccagcacgagccgagccgtatttgcaatcgtgcgacatggtggttgagagacgttattaccgctgcccatttcgcccgtgtctccggcgacggtaatgcgaactgcgacaccgcttccagttctaatggcgttcgcccggctttctgtatatcttaaatctgcgccccccttgtggggcgcacaaggaggtttattaacaagtgtctgtattgaaatcgaaacgaaaaccgtcacagtttgaggtatttcaccacctcaacaaaatgcgtaaggaggtcacggatttactgctccgtgatttcgggtacgacctcgacaaagccgtgaagaaagttgaaacaaccttcggcggcagaccgtatgaggagttatcacccgatgaaaaagtccgatatgaaaagctcatggaaaagaacactgcgtttgcagaatggttcatcgcagacgagcgaaaagtgattgttgattgtctgcgtaatatcaccgaggaggtatatgttgcaaacagcatttacccgacctaccgggaagaactgattgagcgtagagttcaccaagaccgagcagtcggacagtgttataggctcacacaggaattgcagtatgctatcgagacccttcctgtcgatgtgaacaagtaccttcgtttcgctgaaatgatacagaccgaaataaaccttcttaaaggttggagaaagtctgacaacaagttcaagtcggctctccaagagggtaatctctgattccgcttccaatttcgccaatgtcaacaacaacggtaatgcgaactacaacaacgcttccaattctaatggcgttcgcccggatttcgattctgtgattgagtagcctatagagcgtttcacagacagagaaaggagagattatccttccgtatggtaaatactaaatgcgacacctcctattacgatagccgaggttatcagcgcaagatatttgatggaaatgttctttacgaaagtaaagctaaagcaatgaaaggtagtgattggaaaccacaggtacagaggtttaacatgacctatctgttggagttatcgaaaatgcaacgagaccttgagtacatggagtatgagttcttaccaactacaaacttcaccttgcatgaacgaggaaagctccggcgtattacaggcgaacaggttcaagacagaatcgtgaaacacgctctctgtgacgaggttttgaatcctctgattgaaccacacctcatttatgacaatggagcaagcgttgtcggaaaaggtatcgctttcactcgtaagaggttgctcacccaccttcggaaatattatgcacagcatggtagcaacgaagggtacattcttctgatagacttctcgaaatactacgacaatatcagacatgatgtgttgttgaagttgtttgagcagtatgtcgatgatgaacacgccctatggcttctgcgaaagaccgtagaacgctcaaggattgatgtatcgtacatgaacgatgaagaatacgaacactgtctcgacaagttgtttgattctctcctctatcagtatatgaactcgaagctgttcacaggcgaaaagttcatgggaaagcacctcaatatcggagaccaagtggcacagaccgccggaatctcttaccgaatacgaattgataactatgtcaaaatcgttcgaggtgtgaaattctacgctggctatatggacgatagttatgctatccacgagagcaaagagttcttacaggagcttcttgaggacattatcgagatagcgaacgaactcggaatcacggtcaatacccggaagacgagaatctgtaagctctccgagcattggcgatttcttcaagttcaatactctctaacggacaccgggagggtgattcagaaaatcaatcccaaacggcttaccgcaatgagacggaaaatgaagaaactcgctccgaagctaacagaaaaggagtttacggacttctataagagttggtttaagaatcattacaaaataatgagtaagaaacaacgaagtaacatggacaccctattcaatcaattaaaggaggtaacgaaatgtacactatcacccttgccaatggcacaaagctgaccgggctggatatgaacggcacgaactatgtcagcaaagaaaaggtggacgagactatcttcaaggataatctctctaccatgaaggtctccgatggagagaccgagactacctacactgatatggtcttcattcagcagatggaatgggctgacggcactttctatcttgcgttccgtgagaagaccaaggaggagaagctggtagccgctctcaacgcaacctctaatagtatcaccgatgtacaggtggcacttgcggaagtatacgaaatggttttaggaggtaactaactatggctaagatttacgttgcactgattcgcaaaggtctcaagaccattaacgatgtacccaaacagctccgagaggaagtcaagaagctgttggaggaataatcatgctgtggcgcattttgctatggctcaacaggaaggaggtgaaaaacatggctgttatctatgtagcactcattgtcaagggtaagcgtacttacgcaagcgttccggctgttctcaaggaacaggttaaggaaatgctcattgaccttgagctggaagaccttatcacggaataaggcggcatgagggagggtcactcccggctctccctcacattctaaaagaggaggacaagaaatgtgagcattgagttcaatcagattcttaccttcgtctccgttgttgccgccgtgtactttgctttcaagagcaatagtcgagccaataatgacgaggtgagtaagaaagcacaggttgacgctattctgtctcaaaagctggattctatcagtgatgatacgaaagaaatccgcaaggaaatcacagacgttaaggtaaaggtcaacgacctgtccgagcgtgtcgtgatggttgagcagtctacgaaatccgcacaccaccgacttgaccgatacgaggaagaagaaatctaccacggtaagccaagaaaacgatggtgggtatgaaaggggtgatacccgatgaaccattcagattttgtcaaaaccgttgcggcgtatatcaagaagtacgccccggtatacagaatcgaggtcgtgtcacctatcatcgctcaagcgatgttggaaagtggctacggcacttccgagctggctgtaaacgctcataactactttggtctgaaataccgggaaggtcgttgtaagacctgtatcggtatctatcgcatggtgggaagcgagcagaacgcagacggcagttacaccagttctgctatgcagtggtgtaagttcaaggatatggaaaacggagttatcggctacttcgatttcatcaacattccgaactataaaaatctcaaaggcgttaccgaccctcggaaataccttgagaatatcaaagccgatggctatgctacgtctcacaagtatgtggacaacctcatgcgtgttattgagacatggcatttaaccgattatgacaagaaggaggaaacaaaaatgagcaacagtcctttggtggtctacaccaagctctccccgaaccattccgggcagagaacccattccattgaccgtatcacaccgcattgtgtagtaggtcagctctccgcagagagtatctgtggctgttttatcagcacctctcgacaggcgagttgcaactacggtatcggtactgacggtcgtatctccatgagcgttgaggagaaaaaccgttcgtggtgttcttccagtcgtgagaacgaccagcgagcggttactatcgagtgtgcgtctgacaagaccgctccgtatgcgttcaatgacgctgtgtatgcgtctctcgtgaacctgtgcgttgatatttgtcagcgtaacggcaagagcaagctcttgtggctgggagataagaataagacccttgcctatgcgccgaagtccgatgaaatggtactgacggtacatagatggttcgccaataaatcttgcccgggagactggctgtacaatcgtctcggcaaccttgccgcagaggtcactaagcgtctcacaggcggctctaccgacactggtaaggtagatgtaccctctgacggtaaaacgctgtacagggtgcagacaggagcgttctcgaagcgttccaacgctgacgcatgggcggcaaaactgaaagtcgctggcttcgatacctacatcgtacagatggataatctgtacaaggtacaggtcggcgcttacagtcagaagtccaatgccgagaacatgatggcgaagctgaaagccgctggctatgacgcttttatcactaccaagtccggcactgcggctggtactgcgaagaaatctgcggctgaaattgccaaggaaatctacaatggtacttgctctgacgctcgctggtcttcgtggggcaacggtgcagaccgtgtaaatcgtctgaaacaggctggttatgacccgagcgaagtacagtccgaggtcaataagctgttttaacccaagtagtaaaagtagttgaaaatcggtttttgcgtaaacttttgctatatatgcgtgtatatagaggaagttatacgaaaaaagccaagaacagctactttaactacttcaaacatcaattttaaggaggaaatcaacatgattaactggaaagtgcgtatcaaaaacaagaacttttggattgctctgattccggcggtgcttctgctggtacaggtgattgccgctgtcttcggttacactctcgatttgggtgagctgggagacaagctgttggcagtcgtaaatgccctgttcgcagtcctcacgattctcggtatcgtgactgacccgaccactgctggcattggagattccaaacaggctcttacttacgagacacccaaaaaagaggacgcagtttaacctacgtcctctactatgaaaacaaatccgacacagtgcttcacgaaaaagaatgagttcggatttgcactatttggtggacctgaggggagttgaacccctgtccgaaagcccgtccattgcggcatctcccattacagtcattattttgacattccctccatgaatcgcctaatgacaggctcttcactttagtagcttcataaattcttccattccctcaaagctttggaaacgaagtgcctcacctctttgaagccggtgacttaagcagtgagtgacttaaggccgactgctgcaactaggcagcgtacgctaaattttcgtctgcgtttatatttaaatacggattgatacgcggtcccgccccgcgaatggcttcctcaacttcagaacccccgtcgaaaccagtacaagccctaatcatgacttctctgtctggtatgactgcaaacgattcgtgtcattattatattccatatataacacaaatgtcaaggatattttattctgagtgctctgagtgctctactgtgctctcccttacgacaagtcttggctgaaatgtaatacacttctgagaattcactccactgcctatctcactgatcagctgctgtactgcctccactcccatgtcatagaccggctgactgaccgttgtcagcggaacgtccaaaatctccgaaaagaaaatatcgtcatagccaactagcgaaatttcttccggcacagctattttatgctttttcagacaattatataccccatatgcaccctttctgcgccactcccagtttgcatccggtaggttccccaatcagcaaaagagagcctgacgacaaatctatttcctctaatattttgtccactccattcacactcggaattgcgagaatctcttttagcagtgtgatacttttcttgcttctgtttttagatatatttacagtatatccgatattattaaaacgtttttcttatcattctaaatcgaacttcttcttgctcactccactctatcatgctataattttttcatagaattcctctgtttcaaggaggaacttaccatgaaaaaaactttacaagatcttacgatcaaagacatttttatgtttggcgctgtaatgactgatccggaaaactgcaaaggcttactggaattacttcttcacaaaaagctggacagaatcatcgtaagtaccgaaaaaagtatgatctatcatccagagtacaaaggcgtccgtcttgatgtctatgcaaaggatgatacaaatacccggtacaatattgaaatgcaggtacttcgaaaatccactctcggcaagcgcagccgttattatcacagccagattgatatggatttgctgctgagcggttccgattaccgtgaacttcctgatacttatgtaatctttatctgtgattttgacccattcggcttcggaaaatactcatattccttttacactgcctgcagagaagaaggttctctcgcattcaacgacggtctttacactatctttttaagcacagcaggcaaaaatgaatcggaagttccggaagcactcgtttcttttctcaaatttgtcaaagccgatttatcagaaagcagcaaggatttccataacgaatatgtcaggaagctccaacgattcatcagccaaattaaagaaaacagagaaatggaggaacgatttatgttactggaagaattactgcaggaagagcatgaagaaggacttcgccaaggtcgtatagcggaacgcactgaaaacatccaacgtctcacagatcttctcttctctcttttaaaaaaatttgacaaacttcctgacagtctttttgagaaaattgaagcagaaaaagatcctgatcgtttcatgcaatggatccagttcgcagctgagtctgcatcccttccggattttttatcaaagattgaataatctttttcatttatatcaaaagaacaaaactaaagaaaaaggcatatcagtaccactgttacattctggttgtttcaaaaacagctcagaatttgcagcgtgatcccgatatgcctatctaaatttcacttcttattttcaaataaaatttattctattatttcatctgatttcacaacgattttacaattttattacagaggaattctatctcatttcttattccagtcccagaatctcggcaagaacatcgacgataatctcatttgtacaagattttacatacccgagtaaatgcagggaaatttcatcctgcttctgcgcctcagtcagtttttgatcgtgctttgtctgatcgatcatctggatcagctgcggtgtcagatcttcataaatctctatcgtcgtatctgtcaccagttttctcaatgcctcttttgttgtaggtaccatgtttttctcctgttctttttcagattttctattgtcatactgcctttttactgctgctttacaaaccgactttcttcactttgcagccgcagccttgtaaccgcagctgtctacccaagatttctaatcttgaaatctctctgtgcctctctttgctgatctttctttgcgatgtcatttcgcttgtcatagagtttctttcctcgcgcaagaccaatctctactttcactaaacttcctttgaaatatactttgagtggcacgatcgccatccctttttcctttgtctttccgagcattttattgatctctgccttatgtaacagcagctttctcgggcgaagtgggtctttgttgaaaatatttcctttctcatatggactgatatgcattccatagataaaaacttctccattttccacccggataaacgattctttgacgctgcattttcccatacggagggatttcacctccgtaccatgcagcgcaattcctgcctcgtaagtgtctaagataaaataatcgtggtatgcctttttattgttggcaatcagtttcgtcgatgttttcgccatcttcctcatcccccttatttaccagttcaaaatctattgtacgctgcagacggtctgtgtcaagtaccctgacatagactttctgtccgagtttatatgatcttcgtgtatgctccccaatcatctcaaagcggtcttcatagtaatcgtagtggtcgtcatgcatattggtaacatgtatcaacccttccaccgtattttccagttctacatacatgccccattttgtaatacttgaaatgactcctgcaaacacttcaccaatgtgttgctccatatattctgccttctttaagcggattgtctcacgctctgcctcttctgccctgcgctccatctggcttgcatgctttgttacttccggtaaaatggattcataatgttccatacggttttcattcatccttccacgcagtgtctctttgatgatccgatggatctgaagatccgggtatcttcggatcggtgatgtgaaatggcagtaatactgcgctgcaagtccaaaatgccctgtattttccggtgtgtattttgcctgtttcatcgaacgcaatgccagtctgctgataaaatccccttccggcgtaccatctactttggcgagcagcttttgaatttccttcggtcttacttctttgtttgccacatgcatggaatgtccaaaattattgataaatgtgcataatttttgaattttttcctcatctggcacatcatgtgtccggtagacaaacgggatctcctgccagaaataatcctctgccaccgtttcgtttgcaagcagcataaaatcttcaatgatttttgtcgcagtattccgatcatatggtttgatctctgtcggagtgccatccgcattcagcatgatcttactttctggaaaatcaaaatcgatcgaacctctgcggtgtcttttctctcttaaaatcttcgcaagctctgccatcagttcaaacattggcacaaattctttatacgcttccatttcttcctgatctctgtcctccagtatttttttgacacttgtgtagctcatgcgctgatcaatatggacgacggtctctgctattttgtgatcgatcacctctccttttggattgacagtcataatacagctaagcgccagtctgtcttcccctgcattcagagagcagattccattggaaagtgcatgtggcagcatcgggatcacccggtcaacaagatacacactcgttccgcgctcatatgcctccctatcaagtgcacttcgctcctgcacatagtttgtcacatccgcaatatgcacaccgagctgataattttctccttcttttgtaatggagatcgcatcgtccagatctttcgcatcttctccatcgatcgttaccattctccaggaacggatatccatacgccctgccatatctgcacttgtgacgtcttttgccacccgctctacctgatttaacaccttctccggaaattctaccggaagatcataccctttcacgatcgacataatgtccgtgcccggatcattcacatgcccgatgatctcaacaacctttccttccggcttcttgccgtcttttccataagaagtcagttcaacaacaactttatgcccggtcactgccccttttgagcgctccaacggcacaaaaatatctttgacaaaccggtcattgtccgggatcacaaaaccaaagtttttatttttctgaaagtatccgaccagcttcaccgttccatgggaaagaatccgcacaattttcccttctcttcgctttccttcgggtgcttttgttatgacaacttccacctggtccatgtgaaatgccccattcgcatcgtcctctgagataaaaatatcatcggcttgtccttcgaccgtaacaaagccaaatcctcgtgcatgcgcctgataagttccgacaagctgctttgcagttcctttcacatactttcctttctgtgtaacagaaacctttccgtctgccacaagcgcatccatcactttctttaattcatttctctgatccttcggcacctgaagaagaattgccagttctttcaacttcatcggtacataaaaatcatcacaaataaaatcgtatataatcttttttcttttttcaaatgtctgttccaatcgtttcactcctttttttcgtatctcatttccctacaattatttctgaacttgcccagaaacgagcaaagaatctcgcaagtcagactctccgcacgcgaacggtgtcgttagcagcgtgtttttcgttacataggaatttcctatgtaacgaaaaagaacatacctatctgacaacaggtatgttctacatttacacatttttccaaactgtctttttctgatttctttgacaatttcttcagcaaatctttgtattgcttctcagtaacacttcaccgatagcatatccgctctccctcacatcctgccaaatcgcacagacgaaagcaatagcaagtacgatctagttaaatacaccgagattcaaagctgctgccagtatcataaataaacatgctaagaacttcgtagatttgacaagtgcaccttccatagaacgtcccttgttctgtccccagtatgtttccgctccacctgcgatcgaaccaagccctgcggacttcccttcctgaagaagtacaatgattgtcaatgcgataccgtctattacaaataaaatagttaatacaattttcaaaatttccatttttacacctcccgtggataaacaatattcattgtaccacaagagagaatcggttgcaagttcaactcagataactttcaaagaagtttttcgggaaactagcaaacgatttctttctattcttccggctctgcgagaaatggaaaaggattttggtactccgccacatcccccagcgattcttcgatccggagcagctgattgtattttgccacacgctcggatctgcacggtgctcctgtcttaatctgcccgacattcaatgcgactgcaagatctgcgatcgtacagtcttccgtctctcccgaacgatgggaaacgatggcatgatacccggcattttgcgcaagttttaccgcgtccatcgcttctgtgagcgtaccaatttgattaactttcacgagaatcgcattggccacgttcttatcaatccccttctttaacctttttacatttgtgacaaacagatcatctcccacaagctgcatatcttgtccaagtcttgttgtgagcaattcccagccttcccagtcttcttcatctaacggatcttcgatggacacaatcggataatccgtcgccagttcttcgtaataatcaatcatctcttccgacgatctggcgattttctgacagttcattttcccctcgcctgggaaataatattttttcatctttttatcatacagctcactcgccgccgcatcaagggcaatgacaatatcttttttcagacgatatccggctcgctccactgcctttgcaatcagcttcaatgcctcttttgcatttggaagatccggggcaaatcctccttcatctccgactccggtcgccagttgttcttccttcaataattttttcaactcatgataaatctccacacacatgcggagcccttcccgaaagcaacaggctcctaccggcatgatcataaattcctgaatatctaacgtattatccgcatgtgcccctccgtttaaaatattcatcatcggaaccggcatcttttttgcatttgttcctcccagataggaatacagcggaatctgaagcgcttctgccgccgcctttgccgctgccagtgacacacctagcattgcatttgccccaagcccacttttattttctgtccgatccagctccatgagaagctgatcgatcttcgcctgctcaaacacatttatcccgatcaaattttcagcgatcttctcattgacatttgccactgcctgctgtacgcccagaccattgtaacgcttttccccatcacgcaattcaactgcctcatatttccctgtcgatgcaccggaaggaactgcggctctgcctatatatgcttctgcggcaagtacctccacttccaccgtcggatttcctctggaatctataatttctctggcgtaaatgtccgtaatcggcaaacatttatacatcataattactatctcctctccgattttattattgccggaacaattccgttctatccgttgacttttcatttcctccgcggtacaatctacatagattattaaatttttataaaatgctgaggtctgcacaaatgaatacaaaatcaaaatggaaatctttttcactattaaccggaagtatcctgatcatggcggttggtatctattttttcaaatttgccaacaattttaccttcggaggaatcaccggtcttgccgttttagttgccaagacaggggtcatgtcagccagtgactttacttttctgacgaacatgcttcttctcctgctcgggttcattgtgctcggaaaaaaatttggactgaagactgcttactgcagcacacttctctccgtcactctttcccttttagagcggatctacccaatgagccatccactgacagatcagccgatgctcgagttgacctttgcgatcgcactgccggcatttggctccgccattttgttcaatatcggagcttccagcggaggtacggatatcattgcagcgattttaaagaaatactcagatttcaatatcggaagggcgcttctgctcaccgatcttgtaatcacaatcgcaggatgttttgtcttcgacatcgagaccggactctattctttccttggtcttgctgtccgctcactgatgatcgacaatgtcattgaaagtttcaacctatgtaaatatttcaatgtcgtctgcgataatccagaaccaatctgtgattttatcatgcatgagcttcatcgaagtgcgacaacctgtgaggcaaaaggagctttctccggtgaaccaaagagtcttgttttcaccgtattgaaccgtcatcaggcgatccgcctccgaaactatatcaaagaggtggaaccaaccgcatttatcctgatctccaacacaagtgagatcatcggaaaaggatttcataatacaatttaataggattactcccataaaatctgtagcaaaagagcttctcaatattttctgatttttgaagtatattatattatcacagattttcattctcccggcactatgcgttgcataatcgccgggatttttttctaaaatagtttcaaaatcgcctcattgttttcaagcaatttatttattttttatatttttttcatttttataaagaaaatccttgttttttcttacatctcgtggcataatgattcctaaatattctgtttttggcattaatgttgtatcactctaaagcagaaaacaataaacttatgatgggaggaaattattatggacaaaaaacgaggatcattttcaggcaaaatgggctttgtacttgctgctgccggctctgcagtaggtcttgggaatctttggaggtttccttatctggcagcaaaatatggtggagggatctttctgctagtctatttaatactggctgtcacatttggtttcactcttatgatcacagaaattgcaatcggccgcaaaaccggtgtcagtgctattggtgctttccaaaaactagataaacgttttggattcgtaggcgtacttgcctgtatcgttccgtttattatcaccccttactactgcgtcatcggcggatgggtaatcaaatacttattcaccttcctgaccgggaaagtaagtgcagctgcaggggatgaatttttcaccggttttatcagtgaatccgtatctccagttgtctggtttgctatttttatccttctgacttccgcaattgtaatcttcggagtagaaaaaggtgtagagaaagcaagtcgctttatgatgccgctgctgattgttttaattgtaggtgtctgcatcttctgtattacaaggccaggcgctgctgaaggagtaaagtactacctgcttcctgatttttctaaattttctgccacaacggtgctggctgctatgggacaattattttattccatgtctcttgccatgggtatcatgattacatacggttcctacatgaaaaaagacagccacctggaagcttccgtgcggcagattgaactttttgatacagcaatcgctttccttgcaggtcttctcatcgtaccgtcagtgtttgttttttccggcggagatgaagctgcacttggcaaaggaccctctttgatgtttatcaccctcccaaaagtattcaatgacatgacattgggcggagtaatcggtgctgtatttttcttattagtattgttcgcagccctcacatcctctatctcccttatggagacaaatgtttccattctccgggataaattcgggtggagccgcaaaaaatcaacactgattattactgtatatgttttaatcctcggatcgatcgtctctcttggctttggtcctctgagtttcatcaagatccttggtctgggacttttagacttttttgattttatcagcaacagtgtactgatgccgatcgtggcaatcctgacctgtatctgtgtcggacacttcgtcggagccaaagtcatttccgatgaagtagaattaaatgctccatttaagatgaagaaattttataccataatgctgaaatggatcgcacctgtatttctcgtacttgtcctcgcatttgcggtatcagaagcaatgggatggattcgtgtataagctcaactttcccctttctgatgaacaagggaacataacaaagacaaccgttctttttgaatggttgtcctgtttttattttctcattattcattgatcgggaagtagcaccgcaaatattgctgcatctaaatcagattcccaaaatcttcttcatcacatctatacactcacttcgtggatctgcgctgtaaatattcacatggtttaaatccccggctctatctgtaaatgccggaaagagaaatccgcattccggtttccctggctcatagctgcccagaagtggacagactgcacaaatcaaatattcaaacatttcctcggattcccctaaccgctccttgtctgccgcctttgctggaatgtcataacggtcatgaaacatgtagactgcatatcccgaatccatataataattttccatgaccacatcataaaacgtttccatcagcgcatcatttttcagaccacactggcgcagtcccatcaaaagctgccacatgctgccggcccttcttgcttcccgatcaaattgaaaatttttcagctgtatatttgtctccgaaaatggaattgcttttgcaatttctaaatgcttttttctctcctgcggggagagcttcagaaagtttgtattaaagctcccgtcatattctccctctgcatcgacataacatccggcaatccgggtaaaagatgtgcgggaaagtgtcatacgtctggtaagctctagcatatcctcacgattaatcatactgttctcctctcaccattgttcggaactctttcggcgaaattccatactccttcacaaatgctttataaaagaccgagtaatcggaaaatccacacaattccgggatactttttagaaggactccatccacaatcagtttttttgcctcgatcagccttcgctgtgtcacaatcttataaaaactgacatccatctgctttttaaacagctgaccgattgccgattcgctgatcagaaaatgtgccgcaatcgtcttcaggctaatctcttctgcaaaatgtttttcaatatagctgatgatctcatcgagaagagccgctttttctgacttcagttctgtcatagcctgtcccttccagctgcgatacagcagacagatcagctgaaggaacaatccgcggctgaataattctgcccctggcttttcttccttctcctcccgcagaagttcctcgaaaattttctgaaactggtagagtactgccccgtttgtacgaataatataggacttttcctgacgctctttcttctcttcccattctgctgcatttaactcttcactgcattttttccagtaatctgcactgacccacagcgcagttcgcagatacggctccgtgagttgttctccgaagattggtctgtgactgacccccggcggaacgaagataatatcattttgctgcagctgatagcgcatatctccgatcaaatattgaatatttccgctccggcaaaagagaatctcatagaaaatatggctatgcagcgacacactgtcttttaagtaactgatatcctcatgcacatcaagatatttgctgtccatctccatctcctgatagccgataaactgtccgctttctttaaaatacagctcaatatcttctcccatagtttcccttaatttctcatactgcttatttttgatctcttcgtaggtcacttttttgagttggctaagtttcacaaaattcctcctatcattttataaatatttcacaaatcgttttctttctttttctatcatagcagaaaatgtattatttttgcaatgttttatgctaattatgcaattcaaattgcaaatttaaagaagtatgatagtaagcaccgaaataaactacacaacaaggagaaaaagttatgacagacaaaaaaattcgcccttttgggaaaaaagatgaactgggctatgtattcggtgatatggcaggaagcttcgtcaacttatttatcgatgcttacttcctgacattctgtacgtatgtactcggaatcagccctgcatggatgggatctttattcctctttgcaagactttgggatgcgatcaacgatccgattatgggatctttcccggatcgctggatgattggaaaatccggtgacaaattcaaaccgtggattaaaatctttatggtacctcttgcactttccggtatcctctgtttcatgaatgttccactggaaggtgttgcactccatgcatatgttgcatttgcatatgtcctctatggaatgagctatacaggaacttccatgccattcggtgcgatggcaagtgttgtcagcacagaccctatcgatcgaagcaagctttcccgtgcaagaagtatcggtggaactttagtaggtatggtagctctttcctttgttccggttatctgctttgacaagaacagtaatattatcccggaacgttttacaatgcttgctgttctcttcggcgtgctctgtatcgtatgctacgtcttactgacaaaactgactatagagcgtgtcagacagtctgaaaacagccagcaggaaaaattcaactacaaaaatgtcttaaaagcagttgtaaagaatcgtcctctaatcggtgtcatggtggcaactgtcggaagtatgctctttatcacaggttccggacaagtccgcagctacctgttcaaggaatactatcacaatacttccgtaatgacattattaagtctttccagcctcccgatcatcattgtatgcttcccgcttgttccaaagcttgttgcaaaatttggaaagaaagcaacattaatggcaggtatcatcagcagtacgatatttagtgtgatcacatttatgattaaaattgaaaatgtttacgtattcactgtattaagcatccttgcaatgatcggacagacaatctttacaatcttaatctgggcacttgtcacagactgtctcgattacagtgaatggaaacttcacgaaagaagcgatggatctatgtactccatctacacattcagccgtaagatcggttctacaattgcttcttccggtatttctttcgcccttagtgcaatcggctacgttgcaggtacaaacgtaacacagtctgcagcaaccatcgacggtatctacaatctggtaacattgatcccggttgcaacttgtgttctggaactgatcggtatcggactgatcttcaacctgaaccataaacagacaaatcagatgtatgctgaacttgctgaaagaagaagccaaaaagaaagagggtaatcttttatgaaaaagacagatatccatctgcacctcacctttgaacagcacccgaagactgagcacatgtttgtgtcaagcgcagaacatatgctcccgcatcttcgggagctttccattgaaaaaggaatcttaatgtcctctggagaagggaactctgcggttccttttggaagcaatgacgagtgcagacaaattgcagaggcatttccgggaatttatttctggatgtgcaatctcgatgatgtaccggaaaatatttttgagcggcttgaaacttataaaaatcagggcgctgtcggtattggagaactaatgatcaaccgcagcattgatgatcctatgatccaggaaatttttgctgctgcagaaacactttcccttccggttctatttcacatgagtccggaagtcggatatgaatatggcattgtcgatgatgccggacttccccttttagaagaaagtctgaaaaaatatccaaatctgaaattcatcggccacagccagccattctggcatgagatcagtggcgatgcctccggagatctctcctcccgtatggagtggggcaaaggagaagtagcccctggcggaagactttcttaccttttcgatacctacccaaacttgtacggagacttgtccgccaacagcggtggctgcgcaattatgcgcgacgaaaccttcggtctttctttccttgagaaatactgtgaccgcctgatgttcgcgacagacatggtcaacgtcgatatggaatttcctctcggaaaatggttggaggaaatgtaccagtgtggtaaattaaaagaagaggtttacagaaaaatcgcttatcaaaatgcagaatccctcttcgggctgcattagaaatggaggaaacagatatgcgtacaagaatattaccaaagatgttaaatgatgaagtagaagaatatttatcacggaatgatatcattatcgttccggtcggaactgtagaaatgcacggtggatttccacttgactccgaaacaaccatcagcgaagcttatgctctcaaaatggcagaagcatgtgacggtcttgtcctgaccggacttccatatttctatgccggagcaactgctagcggtcgtggaacagttcaggtgagcatccgcgaagggattgactacctgacagcaatcgcaaagaacctgttacgtctcggcttcaaacgccagatctatatcagcttccatggtcctgcacatatgacatgcagtccgatggtccgcgatttctttgacgagacaggcgttccgatcctctacatggatctgacgatgcagatgttgaaaaatgcatctgatcttttcaaatccatggacagcttccatgcgatcacaaccggagcatacaagatcatgaaccgtctggaagacgttccgctcacaacaaagtatgcacacagcaagccacagtcctgcaaaaagtttgacgacatcttcggactcgcttaccagagtgcttcgatcggttactacttcggagaaaaagaagaccacatgagcacaactgcaattccggacgaagcatcccgtgaagcacttgcacaagaaggagtagaaatcatcgaaaagactgtagaacttttggaccttccacatattgtcagccagatgaaagatctggaacagtataaccaggaagttgctgaaaaatgcccttgggttccttatcagttcttccagaaataactttctgtcaggaatctatggcatttagacaaacaggtgtatctcaataagaaatttgcaaacgaaaaggcttacacaaaagctgctgaaacatctaacactgatctttcaacagcttgggtaagcctttattctattctattttaagaaagcaccagcccttcttctgccatgacatcgataactttatcgacacactctttgcagagttcatcggtcgcggcttcaaccatcacacggataaccggctctgtcccactctctcttacaagtatccgtccgtcatctccaagtgtttctgccacttcttccaccgcttttacaacagccggattctctctcgcttcctttttatctgccactctgacatttttcagaagctgcggatagatcttcacttcctccacaagtttcccgagagactgttttttctccatgacaacttccatcaaaagcaaagaggtaagaattccgtccccggtcgttgcatatttactgaaaataatatgcccggactgttctcctccaagcgaatagttattttgaagcatgttttcatagacatacttatctcctaccgctgttttctcatagcggattccggctttgtcacatgctttgtaaagtccgagattagacatgatcgtcgtcacgattgtatcgccatttaatcttccctgctcttttaaatattttccacagacatagaggatcagatctccgtctacaacatttccattttcatcgacagcgatacagcggtctgcatctccatcatatgcaaatgcaatatcaagtttcttctctttcacaaactgctgaagcacttcaatatgggtagacccgcagttcgtattgatgtttgttccgtctggctcattgttgatcacataagtctttgctcccagcgcatcgtacacactctttgcgatagccgaagcacttccgttggaacagtccagaccgactctcttatctttgaaagatcgcgtcgcaagtgaaatcaaatgtccgatatagcggtttcttcctgctgcatgatccacagttcttccgatctcttctttttccgcaagcggaagttcctccagttccccatcaatgtatgcctcaatctgtgcttcaacttctgcctccaacttgtgtcccataccgttgatcactttaattccattgtcataaaatggattgtgacttgccgaaatcataattccacaatcaaaatcttccgttctcgccacataagagacacttggtgtcgttgtcacatgaagaagatagacatccgccccggatgctgtcagccctgcaacgagcgcatactcaaacatataactgctacgtcttgtatccttcccgatcacaaccttcgccttatgatcctttccataataccatccaagaaatcttccgactttaaatgcatgttctactgtcagaaccttatttgcctcaccacgaaatccgtctgttccaaaatattttcccatgtttcctctcctttattgcaagtttgttctattatccgctttttttgtacaatctgctttttattcttttacattatatagactttctcacaaatatacaaccatttttttcaattcccgcaaaaatatttttctgacgactcctaaaatattttccggttatcacggaaaattcacaagaacaagtctatacaaatcactgattttcatgtatgatagaagaggtataaactttcaatatcgtatatgaaaatatacacaaaagaattaaggggtgttttataatgaaatgtaacaaatgtcatgaagaaatgaaactaaaagagattgaggtcggaaaagattccgccggcaatcctatctataacttatatgccttttgctaccactgcaagacaaaggtcaatattgataaattaaaaaaagctgccaaggagcgaaaagaagccgaacaacttgcagatgcaaaaagggaagcagcacaaagagaggaagcttccagatctgctgccacaaaagatactacggctccagtacatgtctcagcaagaactcaggagatcccttcccagagtgctatttcccgtgcgtcctcatcaacttcttccgaccgtccgaagaaaaagtccgcaccaaaatctgagaaagcatcttctccgaagaaaaaatctgatgcttcccgctcccgccagactgaaaagcctgcaaaaaagcgttaccgtgaggatgactttgattttgatgatgacgattacgactacattcaaccggataaagtaaaatccacagagaagcgtgttgtttctaaaaagaaaaaaggcgggtgcttaaaaccgtttttaatcttccttttaattctggtacttgcaggtggaggcgcttttatttacggtacttatgtcggatatgatttttcctttatcaatgatctcaaggaaaaaatcttgaaccacacagacggaaccgatgagaaagacaaaaaagaggatgaaaacaaatctgataacggaacaacagatcagacagcaaatccagaatctgataaaaatggagcaactacaaactctgatctctcagacggaactgacaatacaaatactactgacagtacagacggatctgcttcaaacgacacagacaactccggtacaacagaaccagatgctaccacagacgacagcggaactgctgcacagtaaggcaactataacaaaatacctgaacagcaatctatccatttagatctgcctgttcaggtattttttgctctttgtcaagagttgggtgaattattttactcttttatctctctgcctgttccggtatcttcatccatacttttcggattctcttttctttcacttccaaaattttaaaatgcactccatctgcgtccagttcgcattgtccggaatcttttggaatgtatccaagctcttcaatcaaatacccggaaagtgtatcataattttctgtctccagcttcaggtttaatttttcattcagctcttcgatcagaatcgaaccatccagtaaatattccttctccccgattttctgaagttctacaacttcttcctcatgctcatcggtgatctctcccattacttcctccacaaggtcctccaccgtgacaattcccgatacaccaccgtactcatcaatcaataccgccatacgattcttcgtcttctgcatctcacgaaaaagctcatcggtgctctttccatccggcacaaagaacgcttctttcaaaagagctcggatgtccacttcctcaaaggacttctttctcgcttcaatcatcacatcttttacttgaagaatcccgataatattgtcgatctgttcttcatagacaggaattcttgaatgccttgtctcgaggatctcatccagaatcttctctaacggctcctcaatgtcaattgcaaatacttctcttcgaggcaccatcacatctttcgctgtcttatcatcaaaagaaaaaatcgaattgatcatttccttttcaatctcgttaaacacaccattctcgcttccggtctctaacatctttttaatctcttcttctgaaactgcttcctcgagattctcagtcttcattccaatcagatgtaaaaatccattcgtagacagtgataacaacttaataaacggtgataaaatctttgaaataatataaatcggctgcacaacaaataagctgaatgcctccgctttctgaagcgcaattctcttcggcaccaattcaccaaacacgagggtaaaataagataagataatcgtaacgactacaacagcgatcgtattgctgtacggaatcccaaactgtgcgatccatccgcccagcacctgtgaaataccagttgccgcagaagcacttgagaaaaatcccgccagtgtgattgccacctgtatcgttgatagaaactttgtagagtcttcaaacaatgtctgaagcagagctgctctcttacttccctcatctgccagaaccttgatccgattcttattgactgacaccactgccatctctgctcccgcaaagaaagcattcaccaaagtaagaaatgcaagaaataatagttgaaataaaatactgttcccgtcagggtcgcctgcgtccatgataaataaaacctcctgtaattgaaataatctggctctgattatatctcttttcaggaggttctgcaactagaattctagttttttatttagattttatagaagttttacttttggattatttcttagtggtggaacagacggattccagtaaatgccatcgtcatattgtatttattgcaagtagcgatcacattgtcatctctcacagatccacctggctgtgcaatgtatttaacaccactcttatgcgcacgctcaatattatccccgaatgggaagaatgcatctgaaccaagggcaacatctgtcagttggtctaaccatgcacgcttttcttcgcgggtaaataccggtggttttactttgaagatattctgccatgttccctctgcaagcacatcctcatactcatctccaatgtagagatcgatggaattgtctcggtctgctcttccgatgctgtccacgaactgaagtccgagtacctgcggagactgacgtaaccaccaattatctgccttctgacctgccagacgggtgcaatggattctagactgctgtcctgcgccgattccgatagcctgcccatcttttgcatagcatacagagtttgactgtgtatatttcagcgtgatcagagcaattgcgagatcgatcttcgcctgctctggaagttctttattttctgtcacaatattggaaagtaattcatcattgatcaccaattcatttcttccctgctcaaatgtgattccgaatacttctttgtgctcaatcggatctggctcataattcggatcaatttcgatgatcgcataatttccttttttcttctgttttaaaagttccagtgcctccggctcatatcccggtgcgatcacaccatcagacacttctctcttgatcagctttgcagttgcaacatcacagacatctgacagagagataaaatcaccgaacgaagacattctgtctgcacctcttgctcttgcataagcacatgctaacggagataactctcccatatcgtctacccagtaaatctttgccagtgtgtcgtccattggaagtccgactgctgcgcctgccggagaaacatgtttgaaagaagtcgctgccggaagtcctgtcgctctctttaattctcttacaagctgccagccattaaatgcatccagaaagttaatatatcccggttttccacataacaccttaatcggaagttctccctcttccatataaattctggaaggcttctgatttggattacatccatactttaattctaactctctcatgatctgattctcctcatcttatttatttttatttacaatctttgtctcatagtttcctgtctcaatatcgatatagcgtacaaacagcgatactttattttcttcattcaagctattccagagcatctctgtaaactgttccatatcgtctgggattgagatcagttttggttctccttcaaaacttggaagtggattgccatcacatttgtaagtatggataaaatgtccctctccggctaccggattctgatatgcaaatgtatagcggttgcatgcgtccggatttccattattgctctttaaaatagacatcgcatagttgtatgttccattttcaatatgcatgatccctgaaatacgaggtgtatagtttggagcatccggttcaaattctctgctgcgaagtgactgctcaaaagtgagctgcttgtccattccctcataaatcgtgtctgtctgatctccgtttgtcacgatcgtcttattgccaagcacccgcactggcgcatagataattaaacttggatctgttaattttgaagggtcaaatgcctgtgtgcgaatcccctgtccttcttctacaaatacacggtttctgctgttctcgcttcttcccataataaaatatgcagtgactgcctttttcccatccggtgtctttccgatgatgattcctcttcccggatatgcgtttccctgcaattctttttcaattgataacatttccatgaatgattctcctttatctctgttcattgttgaccgttttttccattttattatagaccacatatcggactgttgaccagtatattttactaataagtcttaataacgcccggttataggttctgctttttatttacacaaattctcggaaaaatttttgtagaacaaaaaaataagactgccgtgcttcttcgtgatatgcttccggcagtctattctttttagctcattgtcgcaccatctactgacagaacaacacctgtaatataacttgccatgtcacttgcaagaaatacaaatgcatttgcgatatcttccggttctccgacacggcgaagtggaatcgtattgatcaaaggctgaattacagactctggaagtgctgctaccatatctgtgcggatcacacccggtgccactgcattgacacggatattgtcctttccaagttctcttgccagagatttggtcattccgtttactgcaaatttcgatgtcggatatccacatcctgctggctgtccataaatacttaccatggaacttgtgttcaagatcacaccgcctccctgctctttcatgatgcatgcagctacctgagagcagttaaacactgcattgacatttagatccataatcttctcaaatgccgccggatcatagtcatacagcggatctcttgcggaaattcctgcattattcacaagaacatccagagatccaaactcttctttcactttctcaaacacttctttcacttcttcgtgtttagtcagattcggccaatatcctacaaccggatactctggattttcctccttcagcgaagcaagtgccttctgaaccgtctcctctctagatccaagcattgcaacctttgctccattttctaaaaatttctttacagtcgcatatccgattcctcttgttccccctgtaatgactgcaacttttccttgtaacataccagtttcctccatcttctcttcaaaatttcatgccagtttttgtgtactttctatttgaaactgcacacctttctgtacattagctgttcttattttagcacttattttctaacaatacaatctatattttaaaatttccttttaatttctgaatagttttttaattaacaaacatttccctatacccagtataaaataattcctgccacaacagcgactccataaagcactcccatcatcttcagattttccttccgattccgatttactctccacagtacaaccagtccgactcctgcgctcgtacaaagtcctgccactgccgccgcaaagctgatcacgcctttgatatacaactcagtcagaaggacggatgcagcacaattcggaacaaacccgatcaaagccgtcaaaattggctgaaacaccgaaccactccagaaaaggctttccacctttccgattcccgccacttccagaaccagattcaggcaggcagagaagaggaaaatatatataaacagtttcaaagtatgattccatgccggcaggattaccccatgagaatgcccacaaccacaagattctttctcacacagatcgtgaatttcctttttctcagaaaaaagtttcggaaagcaaaaatctattagatatcccgcaatcactgcgatcacgacttttaccaataataatttccctatgacccccgcactttccggctgacccataatcatcagaattgcctcatccgaggtcgacagaaaaacggcaagcaatgttcctgcagaaatcattcccccggaaaacaaatttgctgcaagcacggaaaatccacactgcgggacacatccaagtaccgctcccagaagaggccctgcgcctctgataccagtcagcacccgctggctaaaattccccgcatgcctttccatcgcctccagcaggcaaaatgccgcaaataaaaacggaagcatccttacactgtctatcgctgcatccatcaacacgtctatgaataagttcatttcgattctcctcccattcttctgataccagaccaaaaatctggtatgaacctattttgaaaatccttctcaacttgtatctttctgattatagcacgtttttttatctattgacaattaaagtttttcgccctacactataagtagttcactttgtaaactatttttgattgtttgtaatcgatactgacatattttgtacagacttatagaaatggagaaccgtgatggattacgactggattgaaatgatgaactacatgcagaacctgcgtcagttttgcagtagaaatgtacggcgcaccgaaaaagggagtatctcaacttgccaggaacttgatcttctgtcccgcatctcactgtctgatgtgccactgacacctcatgaactatgcagttgtatgggacttggcaaatctgcagtcagccgtctgatcgaacatttggtaaaaaaagaacttcttacaaaagagccaagcctgacagataggagaagttatcacctctcgatcacagaaagagggcaaaaagcattggaggagacttacaactattacctctcaccgatttacacaatgcggcgcagactaggagaagcacaatttttgaaactgatggaactgattcacgaaacaaacgatgtcctgcaagacatcgaacactaggagggatttctattgactttttatcaagaactacaactaaatcaagccggttcaaaagcactgatccgaaatatcaaagatccaaaagaaaagtggaaacacatttgtatctacctgtttaagattttactgacagtagcattctgtgttgtatttgtcacaatctatacaaaagtattcggagaagaaaacagtatcgtaggcgtcgttgttctgctcgccgtgatggtcttccgcaacgcagaccttggcatcaagaactctcacggagttctactacttgctatcatttacggaatccttgcatttggaccaagaatctcgaacatggtcggaccattcccggcatttttgatcaatgtagtctgcatcggcgccctgatgtctcttggctgtcacaatgtaattatgtccaatcattctacattcgttctcggctacctgctccttcagggatatgatactaccggaaattcttaccttttgcgtcttgccggactttctgtcggagcttttgcaacctgctttatcctctggagaaaccaccggaaagtccattacaaacgtacgatccgacatattttccaggaatttgacattcactctatgcgtacacggtggcagatccgcctgacacttggtgtttctaccgcaatgctgttcgcgtctctgatccatcttccgagagtgatgtgggtcgggatcgcaacgatgtccgttctgcttccatttaaaaaggatctgatcgagcgtgtcaaataccgtgcacccggaaatattctcggagggctctgtttcctctgcctctactatctgcttcctgaaagctgttatggctatatcggtatgatcggtggaatcggagtcggactatctgcaacctatggatggcaggcagtatttaactctttcggagcgctgtcaatcgccatgagttccttcggagttgcaggagcaatcatcctccgtgtgctcacaaacgcattcggttctgtgtacggactgctcttccacaatatttttgaaagcggatacaactggatcagcgaaaaagtttttgcaaaaaaaatggtttcagagaattaataattttcaagctgtataattatcattagtattttgatttagtagcataattcattatatgaaaaatcgcccaggccatgatatgccccttgtcaagtagacaggtaaaatatctaaaattggatgtggatgatgcctgcatttccttttgaagtgcaggcatttttctatgcacaccatttctctttatatttgcttattcgtttgttttcaggaatcgggtattctgtgggtacatcagatgacaatgcttcctggcgcacttctgatggggttttacagctatatctgtcctgtggacgttcttcactgtaaaaacgcaaataatctttgattgcatatcttagtgaaacctcatcaatgatttcgtacatctgatacatttcagattttataattccccagaaaccctctatcggtccattgtcgatacagtgtccaactctggacatagattgctccatttcctggttttcaagttttttcctgaatgtcttgctggtatactgaaatccccggtccgaatgaaaaatcggtttggcatccggatttgctgcgattgccttatcaaatgtcttaaatattaatctgttgtcgtttcttgcacttacaacatatgctacaggatatctgtcatataaatctataatggcacttaaatacagtttctttttctctccaggcactttgaattccgttacatctgtagcccatttttgattgggaacagtagcatagaaatccctttgaagtatattttctgccgtttcatccggcttggcataaatatattttttcttctttttacggattacagaatggattcccagctttttcataattctgtggactctgtttttactgtacgatgtatgattgaaatggttgatccaggatgtcattcgccggtatcctaagatatggcaaaagcgttcatcatattctttgacaagttccgcaagtctgatattttcaagttcctcatacggcacttcacgatgtaaccatttataataagcagcccttgatatctcaagctgtctgcacatccattctatactccagtttttctttgtataaaaatatcggattgctaaatattttgattcatggcgtaactttccaagcttcacatcccttcgaattctttcactttttttaacagttcaactaccatatccttttcttccaactgacgcttcaaacgcagattttcacgccttaatcgttctagttcatccacttcggcatctgttttgtgacgtcctctccgatccgttaatccatctgcaccatcggtgtcatatttttttacccaggaataaacctggctataagaaacgtcaaattttgcagcggtgtttttatagttacgattatgattgatacagtaatcaacgatttctttccgttcttcaaatgttgtttttcttcgtgcttctgccatatagacctcctgtttcggattgtaatccttaagttctctattggcattatacattctaatccattttcttaaaagaccggaagagatatcatattttattcctaaatcaatggaagagccgtcacctcttacatattcctcaaccactttcattttaaattctttcgaataagacccatttcgcattttttttgaaaaaccggcaagtccatgtttattataaatcaaggcccagtcctgaatagttcttgaagaaatacatagttctccacatatctgtgttctagatttatttccttcaagataatctataacagcctgttctttttcttccggtgtaaactttgcttttctggacatgaaaaatacctccaaagtaacagatttttatatttaatctgtctactttagaggtatcatatcaccatgaggtctgagcgattttttctattagggtagttttttacagtccttatctttttatcgaaatcagtgcgcaaaagaattaaaaaatttctattttatcttgtcgtccatgctcctttagtaaaatcccggctataatatatttttatgaggatttgacccaaatttgaccgagaacggtttggaatgtttacatatttacaaagttacatgtttacaatgtgcctaatgggtggtatattataaatataaataaggcactactgatagttggttagccccaattatttaattacttaaaaaagtaaccgcattccttgggctggtgtgctacccgtcaagaggacaatgaaaaataataaatttttctccgtcagcctattaaccggctggcggtatttttatgctgctttcaacgtaagttcatgaaaggccatcggtgtcattatatgtaacttacgctgtagtcgtcggttgttatagtattcaatatagtcttggatgccttggattaattcttcttttgatgtaaagcgtttcccataatacatttcccgttttaaaattccccaaaatccttccattggtccattgtcaatacagtgtgcaactctggacatactttgtttcatatgatgtttcttcagccgactataaaatgcctgactggtatattggaatccccggtccgaatgaaaaagcggatgcgcatcaggctctgccgttaccgcctgatcaaatgtatccataacaagggcattatcattatgcgcgctgattttatacgagacaatcctgcggtcgcacagatcaagaatcgcacttaaatatattttgtgtacttctacccctatataatatttgaactctgttacatctgtcagccatttctcattcggtttatctgcgtgaaactcccggtgaagaaagtttttcgcaatgtgggagggattcctgtctgctttcgtacagctcttcggcttccatttgatagatgactgtattccgattttccggcagattctcagaatcctcttatcattggccggaatcccataatttacagccagttcatcacggatacgccgataacccatatctggatgcagccgatgtatttccctgataatatcggcaatctgttcattcctgatctcattgtcacttttgggatgtttcagccatcggtaataggaagaacgagtaattccaaggtatctgcacatttgtttgaccggatatccttttgatttggacagttccctgattgcctgatattcacataatttatgtattaaagaaagcgatccctcctttctaattcccttactttttttaacaggtcattctccatctgtaagtctttatttttacgttccagctctgcgatacggtcccgtaattcttcttctggagtgcggcttggcttagagccgatccgccggcctctccgatcctccaaaccggcacttcccattttttcataccgttccacccaatttcggacctgctgataggaacaatcatacttcaaggccattgccccataattccggtcatggtcaagacagtcttttacaatgcagattcgttcctccagtgttgtttttcttgctttcttcatagcgctacctccggtaagttcttttaattccttaccttcattatacgccttgatccaacttgaaagttgagaatgctgtcggattccgaattttacacatatttcatctaacgatccctctccggaaaggtatgcatgaactgcctgcaatttcaattcttttgagtagcgtttatttgtcttaggagacagtaaactttctggtccgtctgttttatagatcctgattcaatcctgaacactccgcttatttacaccgcacatttttgcagcgcctttttggctaagttctccgttcaggtactgttctacgatttctactttttttactgcatcaattttactttttctggacataaaatacccccaagtaggtttttatatttttgtgtcctacttgagggtatcatatcaggcgaggggcggttacttttttgattgatttatatacgcaatcagaatcgttacaacgatactgagtatcattagtacgatggagagcatttcaaaatcactcataagtcaatccctcctttcccagatttcctgtaagcaggatttctatgtaatcagagggttcagtccctctgttgaaggactaaccgcctaccattctcatgtagtgccttgtcttattctatcaaaggaaatgatttgtgacaaggatattctttataaagaataaaaggataaaaatcgatgttaaatgtcaaaaaatatgataatataaaagctatagataacttgcaagtgtgaaagtgcaaggtcaaaaatattcccaataaaaattcgcgaaaattacaagagctataataaaaaatgatacatatgaggagtttaatttatggaagaaaaagaagtaagacttgatgggaaacaaagtggagaacaaaatagtaaaagaaagaaaaagctaaattttgcgaaaattataaaaaggttacccattacagttaaaacgattgtaataattataattgccgttttgttaattataataggaactaaaatccctagtcaaccggattcaaaggaaactattatagattttggatttaaagatgttggagaacttgtaactcaagagtggtatggtagaatattagaagacagttcaaaagaccgaaagatatttaatgctatatccattccatttactgaaagcagattaatttttagcatagatgttgaagtgctggcggcagtaaattttgaagacatagaatatgagatttcagataaaaaagaaaaagtaatcgtaacattgccacattcagaagtatataaagcttatgaagtacaggagtcattttttgcttatttagatgaggaaagttggtttactaatataaatgcaactgaacaacaacagctgaaagacaaaatagtagaaaaagggaaaaatcaagcgatagaatcaggattgttggaaaaagctgatgaaaatgcaaaaaatattataagaaatatgataaaagcaaatgaagttaccaaaaattttgatgtagaatttgaatataagtaaaaggaggagagaaatggataaatttaaaaaattatttaaaaaaatacttattggtgttgggattgcaatagttatattttacttatttttgtttttaacaagagggtaaaatttgtcataaaatagttttgtcaaggaacaaggcgaagccgatacgccgtagggcagtccttgacggaacggacacagccaacagaaccatgatacagtagaggacttgaaaggtcagaaaccttgcaagtcctcttgtctgttactgggcgatacatatcagccttacacggttcacagagtcaaaaggatgttaaaagagatcggttgtgtagcagaaaatatcaatcaaggatacaaagcgaaccgaagaattgggtatcgggaactttatcgcattaaaaggatttcagatggaaaagtaatacacccatgtatcgacatggaatctttaagaagcttctttgcagagcatgatttccctctggaagacgaaaaaacaatcaaacgaaaggagtagctatggaaaaaattactttgacaataaatgaagcttcagagtacaccggaataggtcgcacaaatttgcgacaactgattacatggaacaaaattcccatcattaagataggaaataaaattttgatacgatgcataactctagagcattttttaaaagtgaatgaaggtaataatctgaaaaataaatatgaagtagttgctgtataatatagcaaggctatgatacaatatagacatctaacagaatagtccttgcagatgaaaggagcgtaaaatgggcaaggacttacagggtagagagttaccaactggtattatgcaaagacccaatggaatttatagggcacgattcaaatatcaaaatgagaagtatactttagataataaaaatttgaaaatacttattgaacaaatggaagaattaaagtatgaagtaaagcatggcattcgtacaaaaggtgataatataagattaaatgcatggtttgacatttggctcaatacccataagaaacgaagcataaaagaaagcacaatggtacgttatgatgatttttatcatagatatatggcagaacagatagggaaaaataaactagtggattttacccctattttgattgaacgtttacttcaaaatatggctgatgaagatttcagtacaaaaacaattcgagatgtgtataacatcttaaatgctatgtttaaatacgctatgcacaatcgtattatttcatttaatccatgttcaggggtagaagtcccgaaaacaaagaaaaaagagattcgtgtactaacggtggaagaacagcgagaagtcatggaacaggcaaaaggacgattacataataacatgttagaagttgcacttggaacaggacttcgtagcggagagttaagaggattaacttggtcggatattgattttcgtaaacgtgaaatatctgttaataaaactctggtttatattaaggatatggaaacaaagaaatatatgtttaagtatcaaacgccgaaaacaaaaaacagtatacgaacgattcctatgcaggagagtgtatataaagcattgaagcggcagaaaatccagttaaaagaaatgcagttgatgcgtgaagaatggaataatttagatggatttgaaaatcttgtttttctcggtaagaatggaaagccaatttcagaacgagcatttcaagtaacattgaatgggatagcaaaagcaatcaataaagagcgtgagcgtatcgcaaagaagaatcagacaagttttgaacccatcccacacttctatccacatgcactacggcatacatttgctacaagatgttttgaagcaggaattgatgcaaaagtcgtacaaaaatttcttggacactattcaatatcaattacattggatttatacacacatatcacaaatgaaaaagcgaaagaagatatgaataaactagaaaacctttataaaaaatagtatagatagaatattaaaaattgctaatattgcatttcgtttagatataaagtacgtcaagggtgcccgaaaggtgccctaactgtaaatagcaagtacctatgaacagcgaaaacccgtcaaccacaagggctaacgggcttcgttgttttatagttatctaaaggaatgagagtaaagtatgcgtcttatcttcaacgctctactttaagaggggggagatagtgattacttaatcaactatctgactcttagtataaaaggaaaatgtgtccaaagtatgattgttttctaaaagaaagcgaaaaattcttaaaaaaaaataaacataactcttttcatacgtggcagctctaattctgctgttctatttttaataactgcgaagctgatcactgccgtcatcaactgtattttctatttctttgatcactacataatatccggcatctccagatacccggatgaaaactctatcccctgcttttttcccaagaatcgcttttccaatcggggattctgtgctaataagcccttttaaggaatttccccgcacggttgtcaccagtttgaatacttccacctcatcatcttcttcaaaatagaggtgcacggtgttgtttaatcccacttcatcttcttttgattcatcggatacaatctttgcagtcttgatcatccgttccaaataccgaattctgctctcatttttgtttttctctttcttagcggcatgatattcaaaattttcactcaagtccccatgtgccctcgcttctttgacatcttccagcagctcttttcgaagcacaatcttccggtattcaatctcttcgcgcattttcttgatatcattttttgtcagttcattatacatctgcaatcaccgcctttgcaaaacagattggaagatgaaaatttggttcttcgctctcaatcggactgtaacatccaaaatgctggatcttgtcgtcctctgatattttataaaaattgcagtaaaatctttgtcccgcttttagcttctcaagagaagtaatttccccaagcagtgcttccgggatcaaaacagatacacaccaccgatctgattctattttcgcccgacaatctgcttcctgatagtacacatctgaaattaatgtccgattctctcttgtatatcctttctccgcatacagtgctccgttggcattcatctcaaaatttatataaatacactgtttctctatgcttatatctccctctgggaatgcaaaaaaagcttccagtgcgctatccttatagacgagttctttatctttgttgcaaagtcgcttcggatcacactcttcacaggtcatctccacataaattccctgcccatcgatatatccggctctgccatatgctttcggcgtttgtaaactgttccacaaatattgattgattgcaaacagttcgcattgatcgatctgtgtacggtccgctatgcggtatattttatattccattttttcctccatcattctcacaatctgctattttaagcttccagtttattataccgcttttcctctgccttttcatcatttttctagttcttattgaaatctcttccccattttatctttcggatttttaccgcgcttttctcccacatacagaaaaaaagatccacatcttgtgtgaatcttttttcttccttcttatagtcttgcatcaaataatccgcagaaactgtcaatcggatctgttcctttgaatgcttcttctccattcataagattctcaactaacgcatccagtgttgtatctttggaatcgtaagtgttgatataggtccgtgcctgcgggatatctgcaagcattgtcggctgtccacatccgacaacaacaaccggaacttcaaatacataccacggaatctctccgcctccctttgacataccaaagcttggtcttccgttcggcacatcacagagcgtgattacaagatccatatcggatacgaaatctgcaatggcattctttcctgcaaagtaaatatttaagtctggcttttccccggcttcaatctgtttcttcatgacatcaagcggactttcatagataaatgcatcaaatccttttgcacataacttttcttttaacgcttctgccggatttccttttccgcctccaagcattttcatcagcgctgacatactgttctctgcgcctttgatatgcacgatcataattctcttataacgatctggtgtcatagggagcacgtctttgtctttatattttacaagcgtgatacagtcttcgctgattgatttctgcattgccttgtattcttctctctgaagcacttcctctacagtctctggctgtggaaccagttcttctttgctcttcttattcagacccagatgtgctttgagtcctaaaatacgtgtcaatgcttctgtcattctctcttcactgatgattcctgtcttgtatgcaccaagcattgtagcaaaatcttcctctggatcattgaagaataagaacatatcacaacctgcattgatacttgccggaagcatctctgaacgcttcattcggtctgtcattgctaccatatgggaagcatctgtcacgaccataccgttgaatccaagtctgtctctcaaaagacctgtcatgatctccggacttaatgtagccggcatcatatcttcgtcctttaactcaggattaatggcttttgcataagaaggaagcatgatgtgtcctcccatgatcgcatccagatcattctcaatcaatgtacggtaaacatgtccgtaagtctcatcccatttttccacatcaaaatagtttacattgtttgcaatgtgtgcatctctgaagtcttgtccatttcccggaaaatgtttcgctgcgcatgcaaatcccggaatcgtatgtgctccatttaaatatgctttgctcatagttgctacacgttctgcatctccgccgaatgcacgtgtcacaatctctgtattctcccagttgtaaagaatatctgccaccggtgcaaatgccatgttacatccgattgccgctgcctgttcatttgccatctttcctaatgcaaatgcatactcttccttatctgtagctgcgatcttcacaccagctccaatatgtgtcccatctgcacatgcgccgtctcctccggcttctgtgttgcatgcgataaataccggaacctttgcatatttctgaaggatccgattctgttcctgaatcgcctttcccggagccggattgtaacggcatccaccaaggtgatatttttccattaattcttttaaatattcttcatcgtgtgaagctgtcagctgaaagaataactgtcccactttttcttccgggctcatatttgcaattgtgtcttttacccattgacagtcttcctctgacagataatacggtcttgattttaaatctaccatataaataacattctcctctctgcataaagcttttgcgcaactgattataccattatattatacaaaaatgctacatatttcttgtatattttacacaaatttcatttttctttttcctaatatagattttctaatactatgcaaagctggctactctatactgctccatccagcactggagccaggagaacttttccggttccacgatacacatttacaagtccttcccccgaagctgccgaacctagcagtgtctttcctgaccgttctacagtaaaacttaagctgccgctccatgcgatcgccatgttgccatctactttcaatacatcatcctggagagtgatctccacaagctcctctttcggacaaggtgcttccagacaaagcactccctctcctaccactccaagattgaacagcccttcatttcctgcaacagcagaagaaagattggagcgcatcactgctttgtgcttcagtcttgcatcacatgccaggaacaatccgtcatccaacacgatggaaccattccagtcttttaaatctaccagtaggatgtgcttataagtcggttccaacacaagaattccgtttccggtatattccggcttgatcgccgattccccggttgcttttcccctgactgcttttccaaagaaatcgcccacaccttttactcccgttgtcgcattgacattgcctacggtccactgcattgctcctgcctgaagtgtgatatttgcctgattgacatcacagataacctggcgctttctcacattcatctcattacaaaaataggccaacgtagcattgtgcggcatcacacttaaatcacgctgatattctatgacagtaaacggaccaagagagtttaacactttaatatcatcattattcgtaaaattagagattctatacatcgttttcttcctccttatcacactttcctgcaatctgtgctagtaggtttattatacggtgtttgtacaaaaaatacaatatttttatatttttcagctatttttcatacagtttatgcgcttgtattgaagtattccatcatttttcactgttctgaatttttattacagaatatcgatatactctccattcaatgccttattcatacttctgaccgcacagaattttccacacatggagcaactctcctcaatttccggtttgcggtcttcccgaatctgttttgccgtttctggatccatagaacacttccactgctcctcccaatcaaaagttcttctggcatctgccatacgatcatcgatatctcttgcatgcggaacatgttttgcaatatctgcggcatgcgctgcaattctggaagcgatgatcccctgtttaacatcttctacattcggaagcgccagatgttctgccggtgtcacatagcagagaaatgctgcacctgctgaagctgctactgcacctccgatcgccgctgtaatatgatcatatcctggtgcaatatcagtcacgatcggtcccaatacataaaacggagcacccatgcagattgtctgctgcaatttcatatttgcttcaatctgatccaacggcatatgccccgggccttctaccatcacctgcacatcttttgcccatgcacgttttgtcagctctcccaagcgcaccaactcttcaatctgacacacgtcactcgcatcggccagacagcccggacggcatgcatccccaagtgaaattgtgacatcatattcccggcagatttcaagaatctcatcaaagtattcgtaaaatggattttcatttccagtcatactcatccacgcaaacacaagcgatccgcctctggatacaatattcatttttcttttatgcttcttgatctgttcaattgtttttcttgtaattccacagtgcagtgtgacaaaatccactccatcctctgcgtggagtcttactacatcaataaaatcttttgctgtcagtgtggcaagatctctcttataatgaatcacactatcataaaccggaacggttccgatcatcgccggacattcttgtgtcagttttcttcgaaatggctgcgtattcccatgagaagaaaggtccataattgcctctgctcccatatttaccgccgccatgactttttccatctcaacctcataatctttgcaatcttttgacactcccagatttacattgatcttcgtacgaagcatagatcctactccatttggatccaggcatttatgccttttgttggcgcagatcgccacctgtcctttcgccaccagatcccggatttcctcctctgtgcggtattccttccgcgcaactacccgcatctcctctgtgatgattccctttcttgctgcttccatctgtgtgtagtatttttctgacatatgatgtacctcttctttcttctgcccgcggcagaatatttttcatttgctctgtgccggaatttttttatgacagaactccaaaaggatttcaaggattatgcctgggcggagcattttttcataggactctgctttttattccatagcatttctcggaaatttcctatgtaataaaatataataaaaaacagagtacctcaattggtactccgtcaaacttcttaaaatcaattctttcctacgttggcattatccaaatcaggtatcagggtcgaagttcacaccttcctctcagcctgtctacaagctccccggctatttacttttctagaaaatagtaacacactaataactaaaagtcaattttttgatcttccagaaattttctgatttcttctttcttcggcatcgagcggattgctcctttttttaaagtgatcagcgccgcccctgcgtttgcaaatgtcagcagttcctctaaatcttcttttgacaactgctctagattgtgttccaacaggtatcctaacgcacagccacagaacgtatcacctgctcctgtcgtctcaatggcttctacacaaaatcccgccttttctacgcacatttccttataatatgcacggcttccttctttccccatcgtaagaagaattaaaggaatatgatatttttcttgtagcatacggattcccttgtcgtagtcttcctgtcctgtgacgaattgaatctcattatcagatattttcaggacatcacattgtctaaacccatactccatctgctcttttgccaagtctaaagattcccagagtggttccctcaaattcgggtcaaaagaaatcatagccccggcctctttggcgcagcagattgcttttttcgttgcatttctcacaccttcatgtgtcatagagagtgttccaaagtgaaagatttttgtatttcggatcagttctagatccacctcttcttccctcagcatcatatctgctccggggttccgataaaaagaaaactcccggtccccatccggcaacgtatgcacaaatgccagtgtagtccgcacttccgggtccatccgaagacttttagaacagattcctacttcatccaatgtatgtttcagcagagttccgaacatatcctgcccaactttccctataaaagcaaccttcttcccaagattatttaacattgccaatacattgcacggggcgccgcccggatttacttccagaagctgattcccctgctcactttttccactttctgtaaaatcgatcaaaagttctccaagcgctgctacatcatacatcttctttcccccttcacgcacttcttagcattcttctattttttccagataaaattcaaatgccacatcatcgcctttgattgccggtataagaatcccgcctgtcataagtgccttaccgctaagcttctcttctttttgtctgcctttcacaaacctataaattgctgttccatccactcctaatagcttaatgcgatggcgcagtacatttgatgcagctctgaatgccacaccttgtacaagaatcttactgcagtcctccgaaataaactcccatgctgccaaatcatcttttttcggattactcagtctataatactttccgccataaatcagttcttgatactccttatacgccttcacctgctccgcaactttctctttctcattctgatccagctgattcagatcaagttcatagccaaagcttcccgccattgctactgttcctcttgtctcaagcgacgtaattctaccagtctgatgattcggtacggcagatacatgagaaccaaccgcagatatcggataaaaaaagcttgttccatactggataaaggttctttcatgggcatctgtattatcactgcaccaaatctgcgggcaatagtacagcattccggcatcaaatctgcctccacctccactacagccctcaaataatacttctggaaattcatctgtcagacgttctaaaagttcataaacacctaacacatatctatgcggcatttctttctgacgttctgctggaagtatcgatgtataccagtcagaaatgctacgattcatatcccatttaacatattcgatatgattgtctctcagaatcttactgatagactgatataaatattctactacttccggatttgccatatcaagtactaactgatatctgcttctcataggctttctccctgggatactgattgcccattccgggtgcgcccggaacaactcactgtcttcggaaatcatttctggttcaaaccatattccaaatttcatgcccatatcattgatttttctgacaagtgctcccagcccccctttcaacttcttttcatttacttcccagtctccgagccctgatgtatcagaatcccgttttccaaaccagccatcatctaacaccatcatatcaatacctagttttgctgcctgacgggcaatctgttctatgtcttcttcattaaaatcaaaataagtcgcttcccagttgttgattagaactggacgttttgtcagctgatatgctcctctacatacattgtggcgtatgacatgatgaaacctctgtgacaattccgccattccatttgccgaataagataagattacttctggcgtccaaaaattctgttccggttccagttgccatgaaaaagtatccgggtgaattcccattacaagtcgtgtctgcccaagctgatctttctctatctgtgtctggaaaccaccactgtacatcagtaccgctcccatacactccccatctttttctgtacagtctctctcgcagagcagaaccgatggattctgctgatgacttgatgttcctcttgtactgctgctttcctgaattccgtaaaatagtggggtacgttctgcctctcgttccatcgtatgtcttccgtgaaaatgaatccagtcccaatttccgtccggaatatccatgcaaagactatgtgcacgctcaagcacgattggcatacttccccggtttatgatcattacactccgcgtgatcacatctgcctcttccagtactccatagaaaagatgtacctctgtttcagatgccgtatctttcataagaatctccagtgtttccgcctcgttctcctctgcataaactgccggcagtcccggaatactgtattttcctttcctgataaaatatttctgaaaccgtaaatccagtgcctgactgccatctgcatgccgcaccgtcactgctggtacccggaaatctcccactccactccctgcatactctaacggcattgtattcaacgaatacgttctgtcattttctgcttcataaatatttccggaaaatcccacatccggataatccaagagatactccatgctcactcccgttttttccccataccacaaatgtttcactaccccaaacgaatctgccttcatctgataaagtgtattcgcagtttccagagaaaaaatctgatcctttactgttattgccatactatcgtttcctttccgttttcataatcctttccataccgggtaatctcaaatccataagacctcaaatctgctgacaatctaatactattttccttgtatttccttgtgatcatgagtctctccccctccgtttccacctggatttttccatccagatgaaatgccggttccatattacgaatcgccatgagctttttcaatttccttacaaccgggcgctcctgctcccctgcaatctcttccagtgtataatagtgtcgattaatatcccgtccatttttcgtcttttccatcaattcgagatcattttcccctgcgagaagtcccacataatatacttgtgggattcccggtgcaaagaactgaatcgctctagccagcaaataggcatcgtctcgattgccaagtgcagaataataggtcgtgttgacctgatatacatccagattattatatgcttccgaactgtaaattttctttacatttgccccttgccgatacatctgttcctgtactatgtaaacctcctcgtcaggaagaagatctttcacatctacaatccctatcccatcatgagtatccaaggttgtaaattgtttcattgggcacatctccagccacttctttaaatatacccccgtgtgattataaagtgcgtgaagtgtcagcactggcagcgcaaaatcataaatccagaatcccttctctgcaattttcatcggaatcgtataatgttcatggatttccggaagaatttccacttcgtaccgtccaacaatttgctcaatttcatgtagcaattcccaaatatccggttctacaaaaaagcaattcgtatcttctttcttaattgcataagcgaatgcatccaaacgtatcaaagatgctccattttggcacatctgctccagagttcctttgataaatgattttaccgcttcctttctgacatccagatcaatctgctcttcacagaaagtgcaccagattttttctgttgttccatcttgaaattccacttcaatatagggcgcccttggttttctcttgtaaatcttatcaagctgttcctgcgtcggtgctccatttccccaaaactcctcgtaacgaataaagaaatcggcatatttcgattcattctttcttttcagaaaatcctgaaaatatttcgaagaggaagaaatatggtttaccataaaatcaaacatcagataatattctcttccgattgcttcaatatcttcataagttccaaacgcttcatctaccacatcatagcgcattggtgcaaatccgcgatccgcagaagatggaaaaaacggcaaaatatgaacacctcccacagcatctctataataggtattcaataccgtatgtaattctttcaagttctttcccatgctgtccgcataagtaatcaacatcactttattttccagtttcattctgtctctatcctttcactgctccatttgctacaccattcaaaatctgtttctggcagattacataaaatactaaaattggaatcaatgccagaatataggatgcaaatgcgagattataattcgttccaaactgtgtctggaaatttaactgggccagcggaagcgtattatgtccggtacctgacataatgaccaatggcgtcatcacatcattccatgtcccaagagctgtcaaaattgcaactgtcgcatgcataggcatcatcatcgggaaaataatcttccaatatgtcttccatgcgcttgccccgtcaatatccgccgcctcttctaacgctactggaatgtttttcaagtatccggtataaagcaacacattcatcggcatataaaatacaagatataaaatgatcactcccagccgattcccaagtcccatctgtgcagtctgctttacaaggggcatcataagaatcgaaaatggcacaaacattccacttacaatatacaaataaataaaccgaaagcttttcttctttgccatacctctcccaatcacataaccggcaattgaatgaattaaaattgccagcacgatcgtcgccagtgtaatcaacaaactatttccaagcgaatgccagaaatcagtcacttccatcgcctgccggaagttatccagactccaccttgccggaaaagataatgcgcctgccacatcgtttgtcatctcgcttggttgcttaaatgcgatgattactgccatgtaaagaggaaaaaacacagtcgctgttcccaatactaatacaatcgttaagatccaatttgtttttttctttctctgcattataactgctcctccttctttcccataactgtcatttggaaaattgaaatggctacgatgacaacaaaaaacaatactgcatttgcgctctgaaacccaaactgaccgccgtccataccatttttataaatcagataagaaatcgattctgtactctgtgctggtcctcccttggtcaaagacagtatctgatcaaataccatcaaaaaattttttgtacttaaaatgagattgatcgttacaaatggcatcaccagtggaaatgttactttccaaaattctttccatttcccggctccatcaagcatactcgcttcataaacatccgatgggaccgtctgaagaccagaaatataaataatggtattcatcgccaccgcctgccacacaccgacaatcagcactccaatccatgcatacttctcactcgcaagaatactgttctgtagaaatccaatcccgaatacatcgccaaccactggaaggatataagtaaaaataaaactgaaaatatatccgatcacaaggcctcccagaatattcggcacaaaataaatcccacgcaaagcactcttaaatcgtatcttgctatttaatccaagtgccataagcaaactcagaacatttaccaatattgttccagcaatcgcatacttgaatgtaaacagataacttttccctactcttgcgtccgtaaacaagtcgatataatttctcaatcccacatattcataagaaccataccctttataatttgtaaaactatatacaattccttttagcatcggcaacgtattgaacataaaaaacaacacaactaccggtattacaattgccagaaatgttctctctcgattgctcattttctttttcattgtgcatcctccatccctttttcatactcctgcactttgcggatcaaatctctgttatatcgtttccattccgtgtcaaactgtttcagaaatttatctgctgaattgtcactttcatccagcaaatacgtctgaatcatcgcatccacactcatttcgctcggataatgatgatcttgaaaatctgccattctgtcatttctaatatattctctcatccccgtcagttcgcttggaatagaaaaatccccctctttgcaggcaattcctccctgatcttccagataaatctgaattacctcgtcctcatataaaaaacgaagtacttcataaactgcttccttttgttctgtatttttcataacgcaaaactgaagatcaattcctgaatttaatacattctccttctcagaatcattcgccggaaatacaaatgaatcaattttcatatccggattgactgatttaatctgagggattgcataacttccaatcggatacatcgccgattctccccgggcaaacgcggtacatgcatcgttatagctataagcatacggattgtcttctgcatatggaagaagcgcttttattttctcggcagtttcacgatatgcttctttaaaagttgtctcctccctatttacctggctgcatatgtcggaatctgccagaccaactgccaatgcattccacggtgcaagacaagtccatgtatctttaaatccaaaatacaatggctgaatcccacagctttgaatctcgttacataatgtcataaattcttcccatgtttcaggaatctcccatccatatttttgaaacatttccttgttatagagaactcccgctgcattggctgcatatggaagcgcataagcaccttcctgcggaacaaattctaattctttatccatctggagataagacttttttacttgttccaattcttctaactctgaaatatccagaaataaatctgcatccagaaagttagaatagttgctgtctcctccaattccaatgatatctggataatcttctctgataaatcttgtttttaaaattgtcatagcttcatttggagaagaaatcgtcagatggatgtcatcatgcgtctcattgaaacgcgcttctattttttcaaatgccttcactgcctccggtttataacacaccatctcaacttctgcgcgatcactggaggcttcctccccacagcccccaaaatttactgttcccaacacagctgccaacatcagggaaatgtttcttacaatgccttttttcgacatattccatactcctttcacattcattttttcttccgttttagttaaattaatcataacatgcctttatgctatcagaaatagcaatttatttcctattttataccacaatacgattttttatggtattatagtaaataagaccgcattatggtatatttactgaaaggagcccttatgagcaacacattttttcatatatttccacatgaaaactttatcgatcttggtatgtatcaatatggctatgaacagtgcgatcctggtcattcattcggcccggttgccagaaatcattatcttttccactatgtcatttccggaactggaacattaatggcagatgattcgaaagggatcacacagacctattccatcaaaagtggacagggttttctgattttccccggacagattacaacctattatgctgatgaaaaacttccgtgggaatatgtctggattgagtttgatggattaaaagtaaaagaaatccttcagctgacagaattgtcccctaacactccagtctaccgttctcactccaaagatctcaaagaacaattactgaatgaaatgctttatattgtgcacaatgcagaagaatcgccttttcacttgattggacacctgtatctctttcttgatcatttaattcagtcctccaaacgatccaattctgctccttcaagtaaaatgagtgattactatatcaaagaggcgatccactatatagaacaaaattttcaaaacaatatttctattgaagaaatcgcctctgtctgtggaattaaccgaagttattttgggaaaatatttaagaaagcacttggccgttcaccacaggaatttttaatgaattacagaatgctgaaagcaaccgaactgctgaaattaacttctctgtccattgcagaaataggctctgctgtcggttatgaaaatcagttacacttttcgcgcgcattcaaaagaatctatggtatctcaccaagagagtggagaaacagccaaaaaaaggagagtatacatgtttcccaataaacatgatacttctccttaagttcttggcactccccatagctaaagcaaggggattcttgtttctaccactactgcattgactgataccttacagtattgcaatcccttttatacattgactaatttttgaacgtttcatttctttcctctcctccctccagagggttcaccgtctattccatgcttttcctcaaaatatcgacaatttcttcatgcgaaagaatcttatatcccccgtccatcacaaatgttccttctgcaattccctctatcatctcttctgtcacaccaagttcccgcagattcatgacaagcccaatttcacgcatccagctttccatgcttgccagaccttcctttgcaatctgctctttactctttccttctacctgtattccccagacattctcggcgaaccgcacaaatttctgcaaaccatatggacaaatataacggtagtatgccattgagactgcagccagtgtcattccatgtgtggcgtctgtatatgcgccgactgactgccctatcatatgaaccatccaatcggttgtctttccctgttccaccatagtattcaatgcccatgttgctgtccacataatattactgcgcgcctcataatccattggatctgcaaccgcaattcttgaagaatggatcaaggacttcatcagaccctccatgacatagtcggaagtattgtcatcctccccggaaaaatattgttcggtaatgtgattaaaaatatcatagattcctgctaccatctgatattttggcaatgtataggtaaatacgggatttaaaatggagaacttcgggaaaacattctccccaaatacatgaccgatcttccgtttcctctccgaatttgtaatgactgaaccaccattcatctctgatccagttcctaccatcgtcagcacacatccaaccgggatgattcgattatctacctcttccatcctatcataatatttttcccatggatcttcctcacaatacgcagataccgagacggcctttgcataatcacacaccgatcctccccctactgcaagaatcagatccacctcgttttctctcgcgatcttacatccctcatacaatttttctactgtcggattcggcattactcctgggtcctcaaacactgttttccctgcttcttttaacagttccattacctgatcatagatgccgtttttcttaatcgagtctcttccataactcagctgcacctttggtccgtatttttgtaattcttctttcaaaaaagtaagggattgttccccaaaataaagttttgtcggattacaatattgaaaatttcctaacataatttttccttcctttccacttttttgcaaagcatgctctatccaagaacccctgtcgcttttgagcagctctgcacacattgactttcttcgctattcatgttatgttcatcataatacctaaacttaactttaggtcaatacttattttcaaaaatcaaaaaagagatctgataaatgaaatcggaggaacccatatgtatacaatcggccaagtcgcaaaactagttcaccttcctatctctaccatccgctattatgacaaggaaggtctgttcccgacacttgaacgtacttccggcatccgtaaattcagcgaaaaagaactggaagcacttcggatgatcgaatgcctgaaaaaatctgggctgaagatcaaagaaatcaagttatttatggaatggtgtgcccaaggaagttccacttacgaaaagcgcttagaactatttctacatcagcgcaaagtagtagaagaaaaaattgaaaaactggaaaaagtactcgacatgatccagttcaaatgctggtattacgagcaggcgctcgcagatggaaatgaagatcgactaaaaacatataccgaaactcctcaagattaaaatcctgaggagtaataaatgctttctgtctattggctgatatctccatcccctgctgtccaactctctctgtttggttccacagcaaaagaataagagtcctctttatccttttttctaaatggaatcttttgcataactccaataatctgtccggataaaataacggtcaaaagcgaataaatgatcttacttactggaatgtaggtaagggagataagcaataccaccagatcactgatcaaataaatccattggatatccaacggaagtactcgatccaaactcattgcaagcgcatcatctccagtcggagctccacctactcgaacacataaccctacgcttacccctacaaatattgctcctacaactgctgccaaaagtggttttgtggcaatgtcagggaataatggatcaaactgttcgaagatcccataaaaaacagaaaatccaatagaagaaataaaagaatatacaagaaaaagttttcccaataatttccatcccaaaaggtaacataataccgtcagtataaatcctgaaaccgatggcgaaatcccaaaccaatattctaaaagaagtgttaaccctaaaattcctccctctgtcacattggacattgaatggatattgtaaagtccaaatgccaatatcgcacttcccaatagtaaaagtaatacggatgataatttcatttccttccaaactgaacgcattttaaaaaatcctttctattaacctatcatgaaatctatacactcattataaactctggtataatactagagtcaaggagatcaatagaaaatatgaaaaatttttttaaaattggtgaaatttctaaattatatggaatcggtgtagattctatacgttattatgaagaaattggaattatcaaacctcagcgttctgaatctggatatcgctattatagtattcacgacatatggagattaaatgtaatccgagatttacgctccattggatttacaatggaacaaatccgcgaatacttagaccatcatacagttttgtcttcaatttctatgctggaagacgaaaaagacgcgattgcaaagcaaatacagtatctgcaaaagttgcaaaaaaatgtagagcacagattgcataacattcattccgcattatctcttcccttaggtgaaatctgcttaatgaatattccccctcgccgttgccaccttcttcccgaaggatataaaaatgaagaagaaatggatgttctgatcaaacagcttatcaatctaaatcaaaatcgcttatacattatcggaagtaatcaaattggaactatgatttctctgccctctctcgtaaataaaaaagtgctttcctatcaatctgtttttcttatcgatgaagaaggcgaggatattcttgccggcggtcattacctttgcgtcacttatcgcggggattataaacagagctcctactggggacaagaactcatccaatatgcacacactcacaacttcaaagtgcttggtaacttattggaaattctttggatcgacattcacacaacttctgatgaatcagaatatattacacaattacagctgcctatcgaataaaatactaagactgataagcggtggtaaaatcatagcaaccactgtttaccagtcttttttatctcatatacagtttccttactaagctaagggatgatggcaaaaaaatattgtttcattttttttcttttgttctggaaatttctgcttacaaatatctgtatgatatttacaacgtgaataaaatggacacatatcttctcttttttctactttgatttcattggcctcttgtaaagattgttgcaaatcttctttgtccccatttggaactctcattttaggaaccgattggagcaaatattctgtataaggatgttttggattggtatacacttcttcaacggaaccaatctcacagattcttcccaagtacatgattgcaactcgatccgcaatataacgcacaactcccaaatcatgtgaaatgaacaataaactcaaattacgatttttctggatttcctttaataaattcaaaatctgtgcttgtacagaaacatccagtgcagatactggttcatcacatgcaataaatgccggttccaatgctaatgctcttgcaatcccaattcgctgacgttgtccccctgaaaattgataaggatatcgcttcatatgcgtttcgttaagccccacaatttccaatagttcttttactttttttcttgcttcctttttatttgtatacactttatttgccaaaagcggttccatcaggatttcttccactttcatctttggatctaaagatgcataaggatcctgaaagaccatctgcatatttttacgcatttccttttttacttcttttttagaaaaaatattttctccctcaaaaagtatatttccatctgtcggcttttctaatcctagaataattcgtcccaatgttgtttttccacatcccgattctcccacaagagctaacgtttcattgttgtaaatttctaaatcaacatgatgtaatacatgattttccttttttgcactaaacagtccttttgccacaaaagttttacttatattttgtgctatgattaatgaatttcccataaattatctaccctcttcaaataaaaagcatttgacttttgtcccatcattttgctcatacaattttggctctactttggtacatcgttctgttttatgcggacatcgctccgcaaatcgacatccctccggaatattttcgatagacggaactgttcctttaattgccatcaattgatctatctttttctctggatcaggagaagcctgaataagtgcctgcgtatacggatgtttcggagattggaaaaatgtccttacatctgcttcctctacaatctggccacaatacatcacatatacataatcacagttttcacaaatcaccgctaaatcatgcgaaatcaagatgagcgatactcctcttctttcacgcaaggatcgcagcaattgtaaaatctgagcttgaattgtaacatctaacgcggttgtcggctcatccgcaataatcagggatggatctgctgcaatcgccatagcaatcataattctttgatttaaccctccggaaagctgatgtggatattgatcatacctcatttctgcatctggtattccgacagatttcatgagggaaatagtttgtttttttctatcctcttttgacaaatttgtatgaatcttcaaactttcttcaatttgttttcctactttatgcagtggatgcagggcgcgcactggttcttgaaagatcatagaaatatcttttcctcgcactttccgtaattctttttcttttagtgccgttagttcctcaccagaaaatagaatctgtccttcttttattgcgatgttcaccggcatcaactgcatgattgctaaacttgtcatgcttttcccgcagccagattctcctacaatccctacaatctgttgcttttttacttctatatttactttgtctacaatcgaataccctgattttttatcaccaatcgtgacatcttttacttgtaatactatatcttccatcatatccccctatctttctgaacatttggaatccaacatatctctcaggctatctccgaaaaaattgagacacaaagaaagcaaaagaatatagattgctggtgccagagaaatccatggggcatcaaacagatacgtgcgtcctttagataccataactccgagacttgtctgtggcggctgtgcaccaaatccaaggaaactcaatcctgcctctgaaagaattgcaaccgggatagacattgtgtaaagcacaagcagcaaagagcgaatattgggtaaaatatgtttgatcataattttccatttgctcactcccatggaacgcgctgcttctatatatgtactattttttagagataatgtttgcgctctcaccgttctcgctgttccagcccatccaactaagatcagtgctaaaaataaattttttgtacttgctcctaaattgtaaacaatcgccatcgcaagaatcataaacggataagacaatacaatatcaacaattctcataatcaatgtatctacccattttaatgtagtcattccagctatcattcccaaaaatgttccaatgatcaaattgattgttgttggtgcaaatccaataaatagagagattcttgatgcatacaaaattctgctgaaaatatcacggctcaattcatctgttccaaaaatgtgttccatagaaggagccgccttcggtttcatatactgtgtttcattgattccatacggtgcaatgaaatctgcgaaaacagcaagaaaaataaacagcaagatcataagaaaacttataaatcctactggatcttctttgacatacttttttatttttcgtccggtatttttcatcatatttttcatgctatcctcctaatcataatgcactcttggatctgccagcgcataaataatatccgcactgagatttccaataataattaaaaatgtactgagaataatcgttccttgtaacaacggtatatcacgattgctcaaagcagagattgataatgttccaattcccggaatactaaaaatattctcagtgatcaatgcccctcccagcaatgatgtaaattgcatcatcataatcgtgatcactggaagaatcgacatttttagtgcatgaaaaataacaattcccatacgcgattttccctttgccttcgctgttgttatataatctgcctgaatcacatcaatcaaatttgtacgtattaaacgcgaaatctctcctgccatgctccatcccaacacaatagatggtaaaattaaatgtgccggtgttgtaaatccactaattggcagccattttaatttataggcaattaaatactgtaaaataattccaatggaaaatgtcggcattgatattcccatgagcgacactcccataaataatttatccagacatgtatttttctttaaagcacttataattcctatcggtattcctaaaatccatgcaaatgcgattgccgataatgccagctttatcgtattagggaatgcatttttaatcagattgaatactggctgattcattacaaaagaggttcccaaatctccatgtaataaatcttttatatacaaaccaaatcgtaccaaaatcggatcgttcaaatgcatttcttcttccactcgagccaccgtttcgttattgatcttattttgcatcatcgcggttactgcatttcctggaatgtaattcatcaagacaaacgtaatcagtatgacccctaaaataataggaacagatactgcgattcgttttgcaatatatttacgcataagtttttctccttatatgtataaaaggtatcaaatctgataccttttatacattgctatttatttattgtaagaatcatcgatttctacattatgtgttgagcagcaaacccatccctgccagccaagctgaaagttcttcaatcttgggctaatgatgcatgtacgtttttcagctgcgatcggtaagtataatgcctgttctgttacgatttctgattctaatgcctgaagggctgcaattctttcttttgaatcaagttttgcatttgcttctttgatcttatcgcttaacgctttgtctttgatgttatatccattcgaagcgctattttccactgtaaatgttgtgaagaatgctcctggatccggaacatctgctgttacaggtcccaatgaaatagaatacccttctccacttgcaatggtatcccagtaagatgtcatatccatgtttttgatttcagctttaattcctgcttctccaagcatagactgaatcatttcattaataggatgtgtatatgtactttctccattctgaagaattgtaagtgtcacatctgactcatggcctgcttcttttaataatttttttgcttcttctacatcgtatttaattggtgtttgatcttcagagtatcccggaattgccggaggaagaacaccatttaataacgttccttcaccattatagaagttctgattgatcaaatcacgattgattgctgcctgaacagcttttcttacatttacatccgccatgaatgtatcgttctgattaaaaatcatgtaatccatgcttggtggctgatatccgattaagtaatctttccaaaattcatcatttttgaaatgctcaaggtcatctgcctttacacccatgtaatctaactcaccattttcaaacatcatccgttcggtagaggcatcaatgttcattaaatagcggactccatcgattttagccggtgtattgaaatattcatcatttcttacaagattgatctcctgatcttgtgtccagtctttaaacttcatataccctgtaccaacagtatattctggatcaaatccaaatttatcttttccttcttcgacagctttacggttatagatagaagccggagcacctgtcatatttgcaagaaaagatgctgatggcgctgaaagtgtgatcgctactgtgtaatcatcgattactttaacaccttcaatcacatctgtttttccatccagacgatcttggtacccttttacttcctgatactgagctgcattgatacaagcttcttctggatttacagctttatcaatggtaaatagtacatcatctgcttttaattcttcgccattgtggaattttacaccttttcttaagtggaatgtgtacgtaagaccatcttcactgatatcccatttttcagcaagacttggaataatctctgtttctccagcttcattcacagttacatcgacaagacgatcataaatctgaagcggaataaaataatctgcatttgttttttgaatgtctaatgtttttgggttttgaaataatgtaagaaccatggtgttcccatttttacttacatattctgtttttgtttcgtttttcgctgcagcattttcttcttttttctcttcgccttttccgcatcctgcgaacatcgaaacggataatgcagcaactaaaaacaggctcaaaaatttctttttcatatttttcctcctcttttatgttttccaacaccagtcacattctaacactatccgtttcatatgttaaattgtttttcgttatatactttattcaaattttctatataaaaagttcattttctttttcttcttgacaagcagcattcattttctttgatgcaaccttaaccataaaggaattgacctttctagaatgacttggacatattttcacacatcgcatacatgaaatacataaatctttgtttgtctttcttggattttcaatcgagattgcccctacaggacatgcctctgcacaaacaccacatcccgtgcagcttcttcctgcctttggttttaatggaacaccattgtattctctatagggataatttcccggcaatcgtaattcactgtttgctgtatccgtgttcattttgtctataatttttttcgtaaagcctttcaattcttttttatcattggcatcaggacgtcccgttgcaaattgatgcataatagaatgttctgcagtagcagcgatcgcagcaaaacaataaaaacctcttttgcttaagttatctgctaattctttcagagtatcctcaaatgctctattgccatatgataccaccaatatagcttttgcatgattccctttaaatttattcattctctctagtgcaatacctggcacccggcctccataagatgggacgccaatcacacaaacatcgtctgcatcaaatacttgatcgaccatgtcttcttttttgctaagatcaatttcctgataactgccaaattcattcgccaccaaatttacaatctcttttgtactgtttgtcggactaaaataaatagaatatgcactcatttttatacgtataatccaattatcttagatggtaattggatttttcctttctccagattaactctgggtatttaagtccatctctgatatagtttgaaaaggcactgtggatctgtctctatttttttacagctttgactgttcggaggtgtctcagaccacagcttttcgtctattactggtaattagtttgttaacgcttgacgtttctatttacgtgtttacacagtcgaattctctgtggaagacttcagtgcctaaatactaattcaggaggtatatttctatgtccatgtactttgttggaattgatatttccaagtacaagcacgattgctgcattatatctgcagctgatcaaaaagtagtttcaaaattcacttttaaaaatgataaagcaggttttgaagaactacttactgttttaaattctctctccaatcctgaggatataaaaatagggtttgaatcaacagcccattatgccctcaatctcgaactcttccttgaaaatgcccaccacagcttcatggaagttaatccagttcttatcaaggaatacaaaaagtctacgaccttaaggcgaaccaaaaccgactctgttgactgcgaatcgatagctcgctggttaatgactgttgagtacaaaccccattcaaaaggattttaccactcttattctttaaagtcactaactcgtttacgagatcgattaattcgtcaacgttctttttatcttgtaaaaatcaccaatgtcttagaccatactttcccagaatttaagcctttttttaatgaaagactttccaaaacggctttgtatctacttgaaaactatggttctgctgaaaaaatggcacgcatgaattctgcttcttatgacaagttacgttgcatttccagaggaaagttttctattcagcagtttctccgcttaaaggagcttgctgccaatacagttggtgtcaacaattctatctttgacattgaattgatcagtttattaaccctctacaaatcgctggtcaaagaaatcgatactttggaatctgagattcataaacttattgaagaagtacatcctcattatctgaccattccaggaatcggtccaatttcagccgctgttatttatgctgaatatggtgatatttctaacttttctaatcccggtcagatgcttgcatttgccggaattgagcccggaataaatgattctggaacagaatctcacggcggcagaatggtgaaacatggttcatcacagctccgatacgtacttcttaatgcttgccttcctctaattcgttttgatttgacctttgcaacctattacgcaaagaaacgtgcagaaggcaaaaaacatcgagtagccattacacatgtagcaaagaaactgatcagagtcatctatgcattggagaggcaagatatagactttaacactcagaaacttcgctaaaatctgctctacatatatttgtctgttccatctgaaatacgatgtactcagatggtctattaaagttacctttttttaccatttaatatttttattaaaaaggtcttgactatttatagtttgacacctcttttcactttctttgctacatcttttcaacattggctctacttgttgccaaaatagtatcactggctttactgtcgtatcatcaaaatcaatataatagtaattctttgttccctcacgtctcatattgataatccccgcatctaagagtactttaagatgatgtgataccgcggaacgcgaaacatgactttttttctgtatttcaccaactcgaattcctcccatccccccactttctattaaagctaataggatctcttggcggacttgatctcctagtatcgtcataattggtctagcaagattataagtttcaataaaatttttcttctccaagctaaaatccttatccatacatcctcctatggttaatcttcgtcaaccattatagttcataaaaacttctacttcaatattggtgtcgcaaatcaagttcattattttgctaaaaaactccccagaaacggaagtcctgaggagttataaaatctttttgaaattgtatgttctgaaacgtataattaacgtttaggtaactgggaacgcttgattttactggattcttggaatgtggtgttgcaaacacgttacaaacgcagggcttctcattactcctcagaacacctaaaaactataattattttagagatacttcatgaaagaaaaatttattgaaaacaatatcaaatcttaactaatttcttcgctatacctacaattacgattttcctgatttctggaaaatcgtttacaataatatgtctactgttttcacacacaaataaactcttcattcatactctacataatccaagcctttatgttattcgtcatattccacaataactcctaactcgagcaatgacattgaaataagtgataacaatgaaaatcctttatctattttatatttcatctgctgataatcataaacttctaataacgtcgacgcaagattatctaaatcatacgtatctaaacctaactcattaagtcctttatccatttctgcaactgcatgaagcaaataatcttctgattcaatatcttcttcagaaaaaccgactgtaacaagctcttgttttatatcctttcctaagaaatatgactgtaaacaaacatcgtcttgtatacaagacaaaagataactttcaaccgctggataacttaatagcaactgtccttgattccctttttcattcccatatggatcagtatacttcataacgtattttcctcgcaactcattaggtttataactcaaatagtctctgtcatataaatagaaaatgggacaatcttctggtttaatgttaaactcttcatttaagcgacgatacaatttatcaagcgcttcttctgtcatttgcgtcaattggtttttcggaagatttagagcaaaaacacgaaattgtttattattgccatgccctataaactcatcagaacccctacgtaattcttgaacctcatatccaagaatatcagaaaaaattttctttaacagcctaagttctgtaccacctgtatcctgacgtccaccttcaacgacaaagattacatttcctatatttttcaatttatcaattttatatttcttcatataatggtaatccctcaaacatacctcccaaatacattttttccaaattttgagcttctcttggcttaaattttgaaagtctagttactttgctcccatttgaatcattaaaaataactaagtcaatttgatctgggcggaatacagaattggaaattaaatttgtcgcatgagaagtaataaatagttgtgacttctttgaattttccataaagtatttaactatcttttctgccaatttgttgtgtaaactatttccaaattcatcaaatataaacattccgggtttttctatagttttaataagattaggtaacatatctgcaaacacttgattcccctgcgattcatcataaaaaatgcttgggaaagggaaactcttacgtttaaaaaaaacaattttttcatccgatccaacggatattcgcgccccttctccagtgctttctgagccatattctagaaagaaatcataattaaaatctcgaagatacttatttatactctctacaccatactcctcagcatattttgtaattgttttaccccacgatgcacctcgattatatccatcaatgtagtaagaattattcaaataatccatcaattcacgaagtattggctcttgtgggaatctacctgtattaaatgaagcagttcgaagaaataaagttttgttatcaagctgttcatctaatatgacagaatcaccaatccttaattctccttttgttccatctcttttcaaaaccacaattgcatcaatcgttatttcttccgaaatattctttgtttttgcattgtattcaactttgtaaataacttctttattcgagaaaacaaattcgtattctaaaattacaagcggattctttgaaaaacgacatcgataacgttcaaaaaactcatcttctcctttaatcatattaataaggaaagcgattcctttcaaagaatttgacttgccagatgcattaggacctataaacaaagctccttttagtatagaattatcaaaaacatttttttcaccaagtatagtatatttggatgctgtaaaatcaaattctgttctatccaaaaaagatagaaaattagttaaatacatttttgtaatcatagtaataccctccttataaatatataataagtaaccctcaaaaagatgtcaatattatatgtaatttttttacatttatactgcaattaaattacacattcttctagactctttctcaaattggagccattaaatatattcaagtttaaaggaacacttgtgtttcttgtcaacacacaaaacatgaaaaaactccccaagaccaaaagtcctgaggagtcgaaaattctttttgaaattgtacgttccaaaaacgtataattaacgtttgctgaactgtggtgctctacgagctgctttgagaccgtatttcttacgttctttcatacgtgggtcacgtgttaagtatcctgcttttttcagaactggtctgtaatctggatctgcctgaagtaaagctcttgcgataccgtgacggatagctccagcctgtcctgtgtatccaccaccgcgtacgtttactaatacgtcgaatttgtcaagtgtctctgttgctactaatggctgacgaacaacaacttttaatgtctctaatcctaaatattcgtcgatgtctcttttattgattgtaatgttacctgttcccggtactaaatatactcttgcgattgatttttttcttcttcctgttccgtagaattttgctttagccactgtaatttcctcctttcaacctttccttaaaatgttaatacttctggtttctgagcctgatgatcatgctctggtccagcgtatacatgaagctttttgatcattgatcttcctaaaggtccttttggaagcattccttttacagcaagttcgattactttctctggtttcttatccatcatttctcttaatgtagtttctttcattccacctacataatcagagtgattgtagtagattttctgatctaattttttacctgtaactgcgattttctctgcatttacaacgattacgtaatctcctgtgtcgatgtgtggtgtataaactggtttattttttcctcttaatacttttgcgatttctgatgttaaacgtcctaatgtcttgtctgttgcgtcaactacataccattttctttcaatcttatctggattagccatgtaagttttcattggtcgacctcctaatatattctctcattaaatcaatattgtttattatgaaatcagctcactccggggctttggtgtaaactgtttcttctcatgtcatactttatgattatattatgaatacgtctttctgtcaactgttttatcgtatttttctactgttttgcaacatttttcttctctctcccagctatattcctcctagtcctgatccacaaattttttatattcttcctgaaatcacctacatttcctctgaaatgtcacaagcaatttctttcacccgattttaaaatcccacattctgtggtatactgtgtttacactggaatccgctcctaaatggcagattccaaaatcaacagcaacggaaggaattttttatgtgggcatatcatagtacattttatcagatttatccaatcggtttctgcggtgcaccactttccaatgatggaatcgtaacaccacgaatccgaaaagtccttgactggacagattatcttcagtcactcggtatcgatgcgatcctctttaatccggtcttcgaatcagatacgcacggttacgacacaaaagatttcacaaaactggactgtaggctcggatcaaatgcggatttttccgaagtctgccagtcactccatgcacatggcattaagattgtgctggatggtgtcttcaatcatgtcggaagaaatttctgggcttttgaagatgtcagaaaatacaaatgggattccgcttacaaaaactggttccatatcagttttgaccgcaacagctgctacaatgatggattctggtacgagggctgggaaggacattttgaactggtcaaactgaacctccagaatcctgcggttgtcgattaccttctttcgtgtgtccaaaaatggatcacagaatttgatatcgatggtctgcgcctggatgtcgcatacagccttgaccgcaatttcatgcaccgtcttcgcaatttctgcgcggagctaaaacctgattttgctttgatcggagaagtacttttcggcgattacaacttgattgtcaacgatgaactgcttcacagttgcacaaactatgaatgttacaagggtctctactccagcttcaacgataggaacctttttgagattgcacactctctgaatcgtcagtttggtcctgaacaatggtgtctttaccgaggaaaacacctgatgacttttgcagataatcacgatgtgacaaggatcgcaagtatcctgaacaatccatcacatcttccgctcgtatatggactgctgttttccatgccgggaattccctgcctttattacggaagtgaatggggagcagaaggcgtgaaatctcctgacaatgattatgctttgcgcccgtgttttgagaaaccactgccaaatgctcttactgattttgtatcaaaactaatctccgtccggaaaagccacgatgcactctgcaatggttcttaccgaaatgtagtgatccaaaatcatcagctgatctttgagcgctgttctgaaagcgaacggattcttgtagcagtcaacgcaggggacaacgaatacactgcatattccggcgaattaaacggcacagccgaagagttactaagcggagaaactgtgaatatgaacggacaggtttctcttcctccttacagtgtacagtattttcaaatgtagtactttttacgagtatattttcaaccaatgtttctgtaatattattttaaaatgcgtatcttaagcgaagagtttccataattcaaaacaaaaaaaagagcctgatctccttctatttttgaaggaattcaagctctttttctcctcctatgcttcttttacaagcacttttgtgatctctgcaatatacattgtatggtaatctttctccggataccatctcgcatcgttttctgttgcaataaatttctctggtttaatctcatctgcataaagtttccgacatacaaaaatcatttctgcctcttcaaatgcagttgttccatctacaaagtatggtgtcagtctagcttctttgattttatccccgtcacgtccagacacttttccacaaagtgcaagcgcttctcggcagttttccccaaaaaatgtaattgtaaacacatcttgtgcatccacgaactcttttgtgtagcgctgcgggcgaatgtaagttgtgacaacattttttccccagagaacaccaacaccaccccagcttgcagtcatcgtattgtgctttttctcatctccagccgtaattaaaagccattcttttccaatctttgtaaatggattgaactgtaattcttcgattttgatttctctaaatgccatatttgtcccttctctctatttcatcacgatcttacggaagtttttctttcctctcttcagcacgaagtcttctccatcaaatgtctcaggagcatatgctgtcttaatatcttctactttctctccgtttacagacacaccgccctgctgtactgcacgtcttgcctcggatttggatggaacaagtccgctctttacaagaagtgtcaggatatcgatcattccttctgtgaaatcactttcctctaattcagcagtaggcatatttgctgcatttccggaactgaagagtgctctggaactttcctgtgctttgactgcttcttcttcaccgtgcacaagttttgtcagctcgtatgcaagaatctcttttgcctgatttaactggcttccttcccatttgtccattgcatcaatctcttccagcggaaggaatgtaagcatgcggatgcattttaatacatcggcatctgcgatatttctccagtactggtagaattcaaatggggaagtcttgttcggatcaagccatactgcaccggactgcgtttttcccatcttctttccctcggagtttaaaagcagtgtaattgtcatcgcacttgcatcttttccaagttttcgacggatcaattctgttcctgcaagcatgttgctccactgatcatctcctccgaactgtaaattacatccgtatttctggtacagtgcgtagaaatcgtatgcctgcatgatcatgtagttgaattccaggaagctaagtcctttttccatacgctgtttgtagcattctgcagtcagcatacggttgacgctgaagtgagctcccacttcacggagcaattcaatataattcagatctaacagccagtctgcgttgttgaccatcatagcttttccttctgagaaatcgataaatttgctcatctgttctttgaaacagtcacagttatgctggatctgctccggtgtcatcattgaacgcatatctgttcttcctgatgggtccccgatgtatccggttcctcctccaatcagagcgattggcttgttccctgccatctgaagacgtttcatcagacagagtgccatgaaatgtcccacatgaaggctgtctgctgtcgggtcaaatccaatataaaatgtcgccttcccttcattgatcaaattgctgatcaattcctcatctgtcacctgtgcgatcagtcctcttgctttcaattcatcataaattttcatgtttcttttcctctccttcatttttaatcaatttccaaaatgcttcttcaaactgccggaaacgtcgatagaccggttctgccagtgttccatcctctcccattcggataaatttctccaaagttacccatcgagcatctgctgtctcattttcctgcaggacaatatccgaaagttctacatcttttctcaccacatagaaatcataaaatgcactgattcccctgacacttccaagcagcatcagttcttcttctgatacaccgattccggtttcttccttaagctccctgactgctccctgacggcttgtctcccctgcaagtacgcttcctcctgtattttcccagcaatttgcgtaagtttccttcgccggatgtcgaagtgtgaccagaatctcttccttgctgttcactacacatacaacgacaacaacatgataatgccccggtgcaagtggctcctgccggttatgctgtttatataaaaatctgcgattttcatcaaatagatcccaaagttccattttgtatccccctttcaggtagtatccttattttcctgtatcattctccgcaagcgatgtcgccagcggctaattccctttccgcgaactacgcattctcatgcaaagcgtttttattacagaaaattccgaagaaatccctatgcaataaaaaaactcctgccctctctgtttcatcagaaagggcaggagtaaatcctgcggtaccaccttttttcacagacgactcgcatcatctgtctcagtaagtatcagtgtctcatcctctcctgatgaacaaaacataatactcagatacgataacgtgtatctactccgtcacagcctacttgatctgttcggtgtgaagctccaagaggtattcataacaaacggtccatgcgcctctcatcacccggctgctttctgtctgaacgtgatgtccgttattacttattcttttcatcgctgatgtcttatatgttgcctatcgtactccatttgtcccattttgtcaaggctgtgcccaccatcttttttatcattttttagatcttctgtgagttcttgcaccgcagactacatttccttatcctattgctatttacttatccaatcttttccgcgttccgctttaattctctctcaacttcttctgcagttggcattccaccctgtgccccaaatttttcggtcgaaagacttgccgccgtatttgcataacgaagcgcctctgcaatcggctctcctttagcgatctgcactgagaaagcaccatttaatgtatcgcctgccccggtcgtatcagccacaattgctggtcttgccggaacagtcagtacttctccattttttctgcacacagatactcccctcgatccctgcgtgatcacaagcttctctggatattttctcagaagttcttcggtcgtctctccctcaccgaaaataagtaccgcctcatgttcattcggtgtcagatacgtcactttctcaatgatatcaagaggcaccttcgctgccggcgccggatttaaaatcaccttgattccattttccgcgcagaaacaaattaaatcgtggactgtttccagaggaatttcctgctgcagcacaaccatatcaaacgcctttaattcttccttgatactgtctgcatagatctggtctacctgtccgttagcccccggcacaacgatgatcgtattgtcattttccccaaccgtaatcaaggcaattccggtcggaacttcttttagaactttgatatgtctggtcccgaccccttcttttctaagattttcaagcaatttttctccattgctatcatcccccacacatccgaacatctctacttctgctccaagtctcgccatcgcgaccgcctggttcgcacctttcccgcccggaatatagtgaatgctgtccccaagcagtgtctcccctttcaacggaatccgctcagcggtcactgtcatatccatgtttatacttcccactactgccaacttcatacccattgtcctccatgttctacattttattctttgttgtctctcctttgatcagcatcactggaaacttcatctctctatcccttggaagttccttcacagtacctaaaatcatctgcaccgcacatttgcccatctctttgatcggctgtgcgactgtcgtcagctccggtgtcaaaaaacgtccaaattttacaccatcaaatccaataatctggatgtcttccggtacccggtatccccttttttgcagtactttatataccgaaaccgcagtcatatcattgcaggcaatgattccgtctgtgtccggatagcgtctgagtacttcttctgcggctttggctccatcctcatacttgtatgtactgtccacaaaacgctccttcatgctatgctgacgacatacttcccggtatccctcgtatcgcctcttgccgctggacaattcttgggggcctcgaatacatgtgatctgcctgcatccacatgcaatcagatactccgccgccagttttccccctgcataatgatctgcctcgataacactggtctgtcccatctcatccaaacgtctgtccacaaaaacgattggcatggaaactgcctcataactctggcttttttctccggtatttgtcattaagatcacaccatccgcctgaagctgtgcaagcatttgcaggtttgcaagttccttctctttctgatcatccgagttacagagaaggatacgatattcctgttcatacgcttccttctcaatcgcctttgcaagttcactgaaaaatggattctcaatatccggcacgatgactccgattatctttgatgatttccggtatagcgcccttgcaagttcgtttggtctgaaaccggtttcttcaatcgctttttccacccgttcccgcttctcctcatctactctcgcagttccgttgatcacgcgggaaaccgtggcgggagacacccccgcgcgctttgctacttctctgatacttgccatccactttccctcctttctgttcactgctccattttctcctaaaaatgtgacaaaattttcattatgaaacccgtttcaaatctgcttttagtataccctttctacttctttttgtcaatttaaaggcaaaagtattttctcccccttaacaaaaaactcaaaagccctcccatgcaaacagatattttttctgtctacacgaaagggcatacctcacatccttttaaaactgatctacaatctttcttgcctctttgattttctcgacactgctctgccagatttcatattcgctgaatcctggaagtcccatattgacgccttctctccggaaagtcattttactttccacaacaactttccccgacatatggtaggatgcaattccagtctcctcatgcagctgatcgatgatttccggcttaatcccgcttcctgccaaaatctctatccttcctctgctctcttgctgcaactttgcaagaaattctcttccttcccatgcagagtttttctgtccgcttgtgagaattgtccggcatcctaatgagattgcctgctccagcgcttccagggcatccctgcttacgtcaaaagcgcgatgcagagccacatccatatctcctgcctccgcgatcaacccctgcatctgctccatgttcagggaaccatccggatttaggcagccgatcacaatcccgtctgcccccagccgccgaaacaactttacctcttctttcaaaatctcatactcattctgactgtaacagaagtctccgaatctcggtcttaaaagcactctgattttaaggcttgtctctttgcggatcttctcaaacaatgcctgagacggtgttgttcctccaatcacaagatttccgcacaattcaatccgatctgcccctcctctttctgctgccagagcagactccatgctgtctgcacacacttctaaaatacctgccatttttttctcgtataatccaattatcttagatggtaattggatttttcctttctccagattaactctgggtatttaagtccatctctgatatagtttgaaaaggcactgtggatctgtctctatttttttacagctttgactgttcggaggtgtctcagaccacagcttttcgtctattactggtaattagtttgttaacgcttgacgtttctatttacgtgtttacacagtcgaattctctgtggaagacttcagtgcctaaatactaattcaggaggtatatttctatgtccatgtactttgttggaattgatatttccaagtacaagcacgattgctgcattatatctgcagctgatcaaaaagtagtttcaaaattcacttttaaaaatgataaagcaggttttgaagaactacttactgttttaaattctctctccaatcctgaggatataaaaatagggtttgaatcaacagcccattatgccctcaatctcgaactcttccttgaaaatgcccaccacagcttcatggaagttaatccagttcttatcaaggaatacaaaaagtctacgaccttaaggcgaaccaaaaccgactctgttgactgcgaatcgatagctcgctggttaatgactgttgagtacaaaccccattcaaaaggattttaccactcttattctttaaagtcactaactcgtttacgagatcgattaattcgtcaacgttctttttatcttgtaaaaatcaccaatgtcttagaccatactttcccagaatttaagcctttttttaatgaaagactttccaaaacggctttgtatctacttgaaaactatggttctgctgaaaaaatggcacgcatgaattctgcttcttatgacaagttacgttgcatttccagaggaaagttttctattcagcagtttctccgcttaaaggagcttgctgccaatacagttggtgtcaacaattctatctttgacattgaattgatcagtttattaaccctctacaaatcgctggtcaaagaaatcgatactttggaatctgagattcataaacttattgaagaagtacatcctcattatctgaccattccaggaatcggtccaatttcagccgctgttatttatgctgaatatggtgatatttctaacttttctaatcccggtcagatgcttgcatttgccggaattgagcccggaataaatgattctggaacagaatctcacggcggcagaatggtgaaacatggttcatcacagctccgatacgtacttcttaatgcttgccttcctctaattcgttttgatttgacctttgcaacctattacgcaaagaaacgtgcagaaggcaaaaaacatcgagtagccattacacatgtagcaaagaaactgatcagagtcatctatgcattggagaggcaagatatagactttaacactcagaaacttcgctaaaatctgctctacatatatttgtctgttccatctgaaatacgatgtactcagatggtctattaaagttacctttttttaccatttaatatttttattaaaaaggtcttgactatttatagtttgacacctctcctgaacctgatttcatctgtatgatactgtttccactatatcataaaaccgccgccttgtaactgcttccagctacccgacagcggttctgttttaaaagggattaaactatctcatgcttatttacaaagctttttaaattcatcagctacaaactgaacttttgttccaataataacctgtacagctgttttgcttggacggatcactcctgctacaccggcagatttgatcttatgctcatcgattaatgtataatctttgatctccagacgaagtcttgtaatacagttgtcaatagaagttacgtttgccggtccgccgacaccttcgagaacaatttttgcaattcctgtgaagtcattgtttgccagttctacttttgtctcatcaatattgtcatcttcacgtcccggtgtcttcatgttaaatttcacaatcacgaaacggaatactacatagtaaaccgcaccaactacaagcccgattgggatcagaagcagtggattctgtgcaaatggagctttaaagctcaggatccagtcaaccaagcctgcactgaagttgaaaccagctcttaccggaagtgctgcaacaactgccatagagatacctgtcaatactgcgtgtacaccatagagcgccggtgcaaggaacatgaaggagaattccagaggttctgtaacaccattgaagaaggaagcaactgctactgacatcaggagacctgctgccgctttcttctttgtatcttttgctgtgtgatacattgctaaagctgctgccggaagaccgaacatcattacagggaagaatcctgccatgtacataccagttgttcccattacaccgccttctgcatttccccagaattttgcgatatcgttaattcccgcaacgtcaaaccagaatacagaattcagtgcgtggtgcagaccgaatggaatcagcagtcggttgaagaaaccgtaaagacctgctccgatcggacctaaatccatgataaatttaccaacagctaccagtacattgtaaatgattggccatacaaagaacagcactaagctggaaactaaagatgcccctgcggtaacgatcgcaacacatctctttccactgaagaatgaaaatgcatctggcaattttgtatttttaaatttgttgtagcaggcagctgcaatcagaccacagagaataccgatgaactgtgtctgaacttttccaaatgccgggtctactttttccactgctgtgtttgtgagcattgccacaacatctgtggaaagtaatgtcgttgtcatgatccatgaaaccaaaaataactgtaaatactgccagtaggataagaccgatcagaacaatctttttatgcctgcgaacatactccatctgtgcctttctcctattccatctcacgaatgatctttcttaatttcaagatcatagacggagctacagaaagctcatctacacccatgcgtacaaaagtctctgtcaattccggatctgctcctaactctccacagataccagcccattttccttcctgatgtgcgctgtccacaaccatttgaatcattttcaaaattgctttatggtgtggattgtagaaacggtcaagtttctcattctgcctgtcaattgccaatgtgtattgtgtcaggtcatttgtcccaatgctgaagaaatctaccatcttcgccagctcatcactgatcataactgctgccggagtctcaatcatgattccttcctcaacatcgttatatgggattccatctgttttcaactcttctttgacttcctgcacaattgcctgtatctgtgctacttcctctgtggaggtgatcatcggatacatgatcgacagattcccataagcagacgcacggaacagtgcccgcaactgtgtcttaaagatttccggctgtgcaaggcagatccgaattgcccggtatccaagcgccggattttcttctttttcaatgttcagataatccgcctgcttatcggcaccgatatccagcgttcggatgatcacctttttgcctgccatattttgcacggcttgtttatatgcctgaaattgttcttcttcatctggaagctcattccttccgatatacaagaattcacttcgaaacagcccgatacctcctgcatcgttttccaatacatatcccatatctgctacactgccaatgtttgcatacagattgatatgtcttccgccttttgtgacattttcttttcctcttaactgctgaagaagctcctgtttttccttctcctcctcaatttttctctgaatcctctctttaacttcctctgacggatccacaaagaactctccatgaaatccatccaccgccgcctctgttccggtatgcagcgcttctaaatccatatctactccgatcaaagccggaatattcatcatacgggctaaaattgccgtatgggaattcgcggaaccatgtacagtcacgaatgccagtattttctccttatccatctgaaccgtctcactcggagaaagatcatctgccacaacaatgaccggctcatccagatccattacatctgccgactgtccagacagattttttaccaaacgattcgaaatgtccttaatatctgcagctcttgctctcatataatcatcatccatgcttgcaaacatctgggaaaaattatctcctgtagaagctaccgcgtattctgcattgacctgctgtgtactgatgatattttcaatggattctttgtaatcttcatcctccagcatcatctgatggacttcaaaaatcgcagcgctggcttctccaacttcctttaatgccttttcatataatttttgaagctgttgtttagaagcctctactgcttcttccactctctgaagctctgcctgtgtatcttcaatctttacacgctttaccacatagtcatcttttttcagcacggatatttttccaaatgcaactcctttatagactgattttcctttcaaacattccatactacttctccttacacttcctacaaattcgcttcaaaaaatgacttcatgccttcatatgcagcttcttcatcgcttccttcaatctgtacttctacagtctgtccacattttactgcaagagacatcaacgccatcagcttagacgcttccaccgttcttccttcttttgtaattgtaatcttactctcatacttctttccttcttttgcaagcattcccgctggtcttgcatggattcccatctcatctttgattgtgtactcaaactttttcattttactatctcccttcgtcttgacaaatttctttctataaaaatagagtaattcataaatattctatcatcttcttttttcacaaacaagtgattcctcaggctgcgatcatcctctggatatgaatggcaagaaatccaacctcttcctgcatgatctgcctttccagtttttctgccatgttatcacagattaaagcggcaattttcattgcctccggatatttttcctgcacaaactcattgagatcaatgttgaccgcttcaccggtctttgtccggacaaccatataatacagatgactcatcagccggatgtaattcaaagcttctttctgcatttctttttccaaatgttcttctatgatctgcatactctcatcaataagctgtgttgcctttaatgtctctgacaccgcttcatcagaaagtccggaatgaatatgaagtgcgataaatcccgcctcatcatctgaaatccgatatcctgtcatctcctcgatgatagatctgctctctaaggctaccgcatactcttttccaaataaaatcttaatatccggtataaacggattcgaaagaaatatattctctctctccctcctcgcggcaaatgcaaggtgatctgccaacggaagtaaaatatctccattgatcgagtcaaatactttctctgccgcctcaatgatcttgcccgctgtctcaatgtaaaccggatcaatcgcattgactgcatggattgctgagtgctgttcttctctcacgaccggtgtgtacacttgaactccctcatcgatcgtcacctcatctcccgctctcttgccaaatccaatcccttttcctaataaaattctttcactgccatcgcccttttcttctgcaagaagtgcattattatttaaaatccttaaaatgcagtacaccatccgctctccttttctttcgtcaggatatgagtccatctccttcatcgagatacataaaaaggcataaactacctgttctactcactaatattgaataaaaccggatagtttatgcctgcatcaccagtaacacgctatcaaagttcttattttgcaacttttgcttcctaatacatgaatctgtatagattgtatatcatcttactagttgtcgttaagttatgtttttaactaattttcttcgatttttttgtgtatttttcacaacttttatcttggcagatagatcatttcttttgtaatttcttttaaagaattggccccacacattgccatcgtatctgcaagttccgccccgattttttcaatgtaagtcttcacaccttccattccgccgccatagactgctgttacaaatgggcggcagatcagcactccatctgcaccgagtgccagtgccttaaagacatctacaccagaacggatcccaccatctacaaatattttcacttttccctgcactgcctccacgatagcaggaagtacctccgcagtggccgggcactggtcgagcacacgccctccatgattggatacaacaatcgcatcgacacctgcctccaccgctttgatggcgccccttgcggtcataattccttttgcgataaatggaacttttgccatctctgccacctggcgtaattcttccacagattttctgcctgccggcggtgtcatattttttaagaatggaagtcctgccgcatcaatatccatagcaaccgcaaatgcaccagaaccttctgcctgcttcatcttttcacgaatgatctctatattccacggcttgatcgtcggaatcccttttccttccactcgtctgattgcatcggtcgcatacttcattacatccggatttaccccgtctccggtcattgcggcaatccctgcctctgcacatgcagccaccatcacatcattgtaggactgatcattgtatttttctccataatgaagattcactgccccaaccggacctgcaaaaaacggataacggaatctctgtccccacagtacaaagcttgtatccacttcttcatgctcagaaatggtatccatctgcacacggatttcctgccatttatcaaaattgcggatggctgtatcccccatccctttcgctcccggtcccggcatttgattccggcatgcccttccattgcacaccatgcacgctttacaatatttcccaatatcttgttttgcatttgttactatttcctcgtatgtcatcctatttccttctttctttatcattcattgtttctttccgcaaacaaatcagaaacaatctcacacttaattttcccagagaagaaatgtcactgtctttccgtctgtcaatactcgtttctgtacggtctctccggttattttattgacagttacttcatatagcacttgttcagcggtctcatttcccggtacttttgttgtaactttcacaaggtactcactcttcgtactttcctgttcaagcaccgtcatctcttctcctttcgcatcctctgttcccttcgcataatattcttctaactttttctgaatttctgaatcagaatacactggtgtctgttcttcttcctgttgtatcggattttctgatgtctttatcccttcctgactctgtccggcattctccgtttctgcttctttcttctttgcttcctctgccttctttgctgcttctggatctgcttcaccggtaatccgctctgaaagcgtcttccacttcagccctgacaccgcctttcccatactgtccagttttttctggaatgcttcctttgacaaagcttccttgtcgttataatatggctgttctggatgtccctccatatcaaaggtatattgttctgtctgaatcactgtatgttctccatccatccgataaaaactcgcatttccataagaggctccgccagaaccatagatatacattgtcccattctcataaatctgaagcagagaccgctccgccaatgtctgatcttcaaacatatttttggcatctactccatcaaagcagtacactcctactacccgctcatcaccaccattgctcctgcttccgaccagcaattccttttctccactctcatcgatatcatacatcgtataaataatttctgttttccccttatctgtctcagttaaaaatactaataatgggttgatatttggatatccctctggatctttctgcacctctgatgctcccatgagaagtgcttcttgatattcatctaaaattttctgataagcttcatcttttttttgttctttcttaagacgttcttctgttctttttgctgccgcctcaatttcttttttgtcaaattttaatgttaccttacgctgtaccggctttaatacagatgaatcatatgtttcataaaactcgcttagttcttctgttccattctgctctgtcgtcgtaagctctgctaagatttccaccccgctctcatcgaattcaaaccataattccgaataccctctcatccgttttgcagtggcattcaatccgattttttccagttttgcagaaatatctgtaatctctttctcatgctcctccccggtcagaagtcctttggtcgatgcatattcccggaaagtcccatcatagttcactgcaaacattccatactcatgcgaacgtgctgtcagagaatactgatttgctgtacttccacagatatagatctttccacctgactcctttaagaaaataccttgacgctctgtctctgcatttcccatcacatttcgaagtgcaagatattctgctgcaagcttgatacttttctctttcttctcatacatctgaagataaacatggttgtgtttttcatccttttttgccttatcttcctcaccggtcttcagcatcagaacaagcagctctttttctccatcgccatcaaaatctttcagtttggatgcgagtacccccttttgcttctccagccgctcaggctgtactatctttttctcgccatctttcttcacatattttgattcataagtacccgcagtacattttccatatttcggtacgagaaccttgtccacatacgtttccagactgactgcttttgtgtcgtctattttatcctgatcttgcgtatgctctcctttattttcttcctcctctttattctcttcctgactgcttgaatttggggaaggtttctcatctggtaccggttctgctgccggtttctcattactctgtgcttcttttttcggtacttcctgcccttttgccacagcaccattctcttttgccttcttcaagattgcctctgcctttttttcttttccctgtgcggtatagatttctgctaatttatcgtaagattttcgttccttcggatcgatcttgattgactccagatagagttcctccgctttttcatactccatatcttccagatatttgtctgccatcgctatcttcgtctgaaatgtcttttcctgcttatctttcatcccgaaatagacacctgtcgtcactccagcgatcagaactgtactgattcccactgccgcagcaatccgaaaatttttgcgcctcttcgtctcctgctgttctgcctcctgttttctctcttgttctatctcctgaaaattctctgtctcctctgcctcaaagtctttctgcagattttcttccacctttttctctgcagatttttcttcctgcgtcgattcctgcggaatctgaaccaattctgccccgcactttccgcaaaattttgcatgatctgcattttctgctccacatttcctacagtacatacctattctcctccctttatctgactgtaaatttcagatgataatgccacaattttctctcgggctgcctgtgtgtctgtaagctgatctgccatcacacataaaatatatggggtctcatcagcccatacgattgctgcatcgttctctacatcggcaagttctcctgtcttatttcctgtttctaccccttctggaatacccgctggaatttttccaattcgctgctgctgctttaataaatttaacatctgatctgcgtgtggatgtctcactttgcaaacatcaaacaaaaaattgccacaatcctctgctgatgtgtaattttctcccagcgtactgtctgccagaagcattcttcccatagaagaatctttgtaacctttttcctgacaataaacattcacctgttccattcccgcagtttcctcaccaccgccgagcattcttgtcaattcgttggctgcatcgttatcgctgactgtgatcatcgccgtgagaagccgatcgagttctgctgctccgtactgtgctgccaaattgtcatactgttcataaacagctcccataatgtacaatttgatcagacttgccgccttttgcttctctgctccaactactgcaaaggaaccgcttgacaattgcttcacatacacattccacttttctccaagcgctgtcctttctgcaatcctattctggatcagctcttccatagcggccatttccaaaggtgcgcggacttcctcttccatctgctgtttctcctgtcgggtctttgcttcttctttctcctcccacagagtctgtcttctttttaagacttcctttctctcttctttttgtaatacagcccctgcatcgatttcctgtgtctgtttctcaatttccttgcaccgactttccaaaaacagccatccagttccaacagccagaagcattcccacacagactgcactgtaaatccatcctgcttttttcccttttcctctttctctctttttcatactgcacctcttgccatagctctaatttccagccacaaaatactggtcaattccatttgcaatgcccttgaccattttcttttcatactccggatcctgcatatttacatcatcctgctcattggtcatgtatcccatctccagaatgataaccggaatctgactccagttgatcccagtcatgttatcatagagctgcactccgtcattttccataccacactcctgacagtaagcattgatcacagattccccgagcgcatagcttttcggatgaagtgctccaacatagggattttctgcggaaggtaccatcgtcattgctccctttgccaatggatcctcacttccatttgcatggatcctcacataaatatcggatccttcctccgctgccataagcgctctctcactgttgctgattgccgtatcatgatcttctcttgtgagcactacttcatatcctctctgttccagttccagacgaagctgcttggaaatatttaatgtcagttcatactccggaacatttgtataacgcccctgcgtaccagaagatgccttcgctttcatttcctgcgatcctggtcccatcggctccaagtcgctcatatctacattcggaccttgatgacccggatcgattgcaattttctttcccttcgcctgtggctgttcctcagtgatcacttctttttttccctctgcctctctttgtgcctgttctttttctagttcttccacttctttttccagttcctgaatttccttctcgatattctgcgctgcttcttttgctgcccgcctctctgctttcgctgtatacaattttcgcgccgctgctgcgcatccgactgatacaatgaccagcagacaagtgcaggaaactactatgattttctgacttgttttcacaattttcccccttctttccagtagctctggcacactgtgataaaagacagagatgtctcacacctctgcctttttgcctatccgtctctcactcacgactgcggacagattttctttattcttgttttgttccgcactttgtgcagaaaactgccccttgcggaatctgttttccacactttatgcagaacctcacttgctgctgcgaagcctgcattccttccttcatatcctctacttttgctccgcatcctacacaaaacgccattcccggttccagcactgcgccacaccttgggcaagtcttaatgctctcaatcgcctcaatctccgaacggattgcttcaattctttgataacttgcctgaaccatccgtaccagctcagccagctgtggctctggatcattctgctttaactcataatacatatgaccaaggttctgacaatatttatcaatttttttctgctcttcattgatctgtgatttcaaatttgtgatatcagccattccttttgctttctgcatgacattttgacctgtgactgaaattttctttcctaattcatcaaaaaaagccattgttctctctccttctattcctgctgctaattgtacattcctccaaacaggcagatgacatcgtcatccagctcgattagtttatcctttcctctgtacaacttcaatgttcccgtagagtcatcgtcatcataatctacaaggaccgctatttttttctcatctacgactttataatcaaaagcatcatctgcgatcacttttgcattttttccgtcaaacatctttaatgtaaacagattcttggaagtattgtagtctgtcttatagattggatatttctgttctttcgtaaattctaaggtacctatcataacatcactgtcaatcagctcttcattacaatacagatcccccattccttcatccatatccgtcagataataaatatctccatcttttgcacccatcatgacatctacatcttctgcaacgacactgcattttccatctgctttcttacctgtcttgaaggaaagaagctggctttcttttatttcgccatccttatttctttctactttcattgtatacccaatattcttttcatcatcgacaaggaatctctgctctcccattctctccttcaattctgtatccaaagtcacaatctcttttccattgtaaatgcaagtctctgccgactcctgaagtgcctcatagtacttctggtctacgtcataaatttcatctaattttgatgctctaactttcggcagctcttccatcttaaatcttgtgaataacactgtgtcagaattatcctgtgcataaatgtcactgctgagtttctttgcgatctccacttcttttccatctttatagcagtacaaggagttctcagctacctcgatagaatgctcttccaattcttccaagaaccactccatatcctcatcgccgttggtgtcatcttctacaatatccatcgcattgatctttttctcatccatctttacataatacaacgctttgtctttttcattattagaaacaacccaacctacatccgatgcgattttctctctttctccaaaattttcgatcagataaagtttatcatcttcctgtacaacaatctgtttcaaatcatccccgatgatgcaattttctgcgctcttagaaagtttctttttctctttctttaaattgatatcctgctgatacaatgcgctcttgccgttgttctgttcgatccacacaatatttttttgctctttatccagtttaaatctagcgacatcggatgcaattttttctttctttcctttccgatcactaatatataatgtatcgtttcttgcctttagataaacaatcttattattatcaagcagtttatattttgtaacggaatcatcaatctctattgctccgccttcttttccgactttctggaagttcagatcaaattctgtcattccatcttccgcttttacatctgtcggatagcagatatattttccatctttggaataggtaacacgcataccataaatctcatcttcatcaccataagatccactgtattccatcggatcttttttgtatttttccaagtctgtctgcattacctttccgtcttttaaatacgcaatctttgtatgtgcatcatctccaaatgcattcacaaggagagcaacccctccgatgacaacgacagctgccgctgccacaccaatgatttttccggatgaaatctttccgcccgagttgcgccccaatgaatgagaacctcctgcattttccccaacgccggattcatccatttccatattctttccacatccgcaacagaaaacggcatccgcgtcattttcacatccacaatatggacaatacttgtgttcctcttcttccggctctgaataagaacctcttatttctgcaccaaggagaactgtctcctcctcatctccttcatttgcctgacagtcttcctgttccaaattttctgccagctctttcttttgtgcttccacacaattttcctctaactttgctccacatgcaaaacaaaattttgaattttccggtaattcacatccacattttgtacatctcatcgtaacttataacctccactgtcaattgcaaattctctggcacttagtaaatctgcattttttatctcatagtcatttaacatatcattagtaaactgcgacggttcaatcgttcccctataccacgatttacttccaaaatattcttgtaattctactgagtcaaactttcgtcctcttctcgcataaatttcatttttcgcgtaattgagctgctgcagagacaatccactgatatcactctctgtcagataacggctgttgctatccggaataatgtactcactgtcttttttggcaactgcattctttttatcagtttccgctttttcggctgttgcgatcagtttctctaacttctcctgatctcttaccagttcttttgcatcctcaagaatctgtactgcatctttaggtgtcccttccgcaataagacgactgctctcctcttccagatatttcatatagtctacatcacactgtttgagtaatttattgacaacctcatcttcctcatccagctcctcactaatggaagtcaagtgctttatcgcatatttataattagaaatctttgtatattctgagatctctttctctaatccttttccgagatcttccacaagactgtcatacttcttttcctgtgtttgctccagatcatccacatcaatctcttctaattccttttttgcttccacatagtctaactttccatcttcaaaatcttctctgatttcttctaactgtccgctgacttcatcttttttctcgcctttttctaccctgacggaatcgttctcatcgtctttctcatagtctgaaacgcttcctgagctactctcatatggagctaaaatcatagatcccatgatcccggcaattcccagcacacttacaacagtcattgctgttgcaatccattttcctctcccggacatcccaaagaccgctgctactgctgcaatcactgcgaatgccgatggcaaaatgtagatcagatacggataaatctcttccagagctccaccggaaagtgtgtctgccaatagaaatcgaaggctgatgaagctgactgctgccaatgctaaaaagactgctgcaattactaacggcgttttattccagctgccatttttcttgctttgcgattgcttttccttctttggcctttctttctgttttttgggttgctctgattcttgcttatttttctgactgccactttctctcacagaatcgttctggctacgacagttgcacatttctccttcctggatcttgcgaccacaatatttacaatacattctcatccctccattcttcttatccttactttttaataaggaagcttccctcttaaataatatactctttcttttgtcatatctgctgccggtccatttggaaaactagagtgatcaattgtcgttccctgccagtaattagcaatcatcgcctctttctgttggatccagctaacctgctcatctgtaagatttcctaattctgctcccggaagcactgcctccagttcagcccacagctcatttagcaaattatcccacagttcatatctgccctgtgcaatactcatctgtctctccacagaatcccctgaggaagcttctgccgctaattgtttatcagctgcctctgtcgaagccagtctcgaatcccaccattcttgcgccgacatttgagaactgctattagaagaaagattggactcgctttctgcttgctcctgtaccttctttaattcttcctctttttgctgaagctgttcttttagttccttctctttttgctcttgttcttctgcttctttctttttcttctcttcttctttctgttcttccttttctcgtgctttttcttccgctttccgttcttcttctatctctttttctcttttctcatgttcttcttgcaccgcctccagccgtttttcctggatcacatatactgcaaaaattccaccgcagaacatcaccagcacaagaccgatcagaatccccatccataaattctttttcttcttttttccagattgctgctcatcgcctgcttcttcgttatcctctttccaatcttggaatccatcttgatcattttgttctgaatttttatctacctctaaaagtggagaaccacaacgtttacaaaactttttatcctcctcatattccgcaccgcacttctgacatttcttcatcttctctgattccttcctcatcccttattgcttcgttccacattccatgcagaaaagatggcccggttttacaatacttccgcagttcggacaaattctttcttgaagttcttcttccttctccgctttctcttctccatatctcgtaccgcacataatacaaaactcctgatcttcttccataggcgctccacattctttgcatactttctctgaggatatgctcaccgcctcctgaagttcctgcacaaatggatcttcgttttccagttccagtggctcctctgtactgatcggctcaacctcttcctccgactgttgttcttctgcaaggatttcttctaccgattcttttgccgctgaagcttcctcttccaaaatttctttgacaattctatcttcttctacagcttcctcttctttttctgcaaggagcttttcttcctctctcagttcctcttcttcctggatcagttcatccacggatggctgttcttcctgaatttctttcatcttatgtccacaattattacagaaattaaaatgaatgctgacctcatatccgcatgctggacataccgcaattcctttgagtgcgagaatctctttttcataatcttctactgtctccttactctcccgaatctgcgtacacatttccatcaattcgctctctgccctgtccccatacactttgtaataagtttctccaagctccctgtaaatcttttcctgtctttccttctctgaagaaaccgctgctgtcagcttcatgatttctgaaatattttttgttttctgtgccattccatcaaaaaattccataataatgtcctccttatacttttctctatcctatacggcatccacatttgccgcaaaagattgcctgtccttttagctcattcccacattgcgggcaaaaagctttctcgtcggtctgttcctgactacatttcagttcagtaattgcatcaaataatggtaagagttccggaagggggtcttcaaaccgtccttcataatatgcctttccaagctttgtgtacaaattttcaagtttcttctctatatcctgcatcctttcatcccttctcgcctttacatcctattctaacaaaaagctgttctttcgtgacacaatccatatctccatgccgcgcggcagataatagatgcggttctttccaagtggctgtccactttttaaatatactgtgcttgtcttcgccggctgcactgcatattcttcacgctgttcaatataccaaattcctgcttctgcaccttccgggctctgatccacataaatttgttcaccctcgatatgaaaaaatacttcacaccgattttccagcaacaatgtcctatccttgtaacttccttcttttccggtaaccgccccttcaaatttctgattgctcatctactcctgcccttctctctatcactgtttcctactgtttgattttctctactccatactgatttcttccagaagatgttttctctgtcttctaaatcttccaatcgtgctgactagaaatagtacgcaggcaattcccccaaggcttcctgctgctgccattatccatccgggtgtcattcccattttacagccatcctcccttcttagcctgcgcatacaactgttccaacaaatccatctccatatccttttcttcctcatcctcatacagttccatcgcctgctcataaaattccttaaactttttgtaatttctcgcatcgtttttcagtaatttctgccggtcaatttcaagaaatgcgtatcttttatagacattataatcttctccgtaagattcttccattgtttttaaatatttttctgcctgatcaagatttttttgtttctgacagagaatcacaagattattgtatgtatcataagattcccatccattttcaataatcttctggaaatttctaattgcctcttctctgtattttccaagacctgtattctctgcaagatcgatgttcacctgcgccaaccgctccagaatcatcatctgattttccaacgggagggaggcttctgcctccttcagcaacttctgctcttgttcccggttatcctctttctcatacaattcactcatcatcagatatgcccttgtcttcaggcctgtatttttagtgatctcgatacatttctggaaggaagtcaacgcctgttttggttcctccaaaaatttttcgacctctcccttcgcatagtacagtgcatcttcgttgattccttgctccatcgcttcttccagaattttctctgccgattccgggtatccggcatatgccaatgtgatcgcataatccttataatacatttctgcaccctcaccggtcttttcaagcagttcatacgtctctaccgcatcttcatattcttccatctgaaactgactgtctgccttcaaatagtagatatccgccatgcgcttcgcattttgctttatcttctcattctgaagaatatcataatcaataaatgcgatacactcctcatatgctttctgttcatacagtgcacaggcattctgataatagctctccaacgaagacggtcttagtctgactgcctcccgatagacctcttcttccttgtcaaactcctgctccgcaatcaattgttcctgcttttccaccagttcattgtagcgatctgtcttctcaagccttatcgtatatacaccatacccagtcaatgcgatacagcctgccagacaggcacacccgatcacacgctctgcccattgacgtgccagaagcatcttatagcgcctatccttcttcgggagcatctgcaatgcctgaagcatctccgccgcactttgaaaccgtttccttggatcctgctccagcgcccgctcaatcacggatgcaaaggtctcccctgccttttcatttaaaagtgtccgatccggctttccctcgttctctgtaagcttttctcctgtaataatatgatacaacgttgccccaagactatataagtctgcccgttcatcaatctttacaaaattttcacgaatcccttcctttatgtttctcactcgttgatattgctccggagaagtatatccatctgtatatccaagcacagtgcccgaattcataaaaaaggaaatattgaaatcaatcagacagatatctcctttcggagtcaacataatattggcaggtttgatatctccatgaatgatcggcggggtctgttcatgaaggtactgaagcgcgctacatagctgcatggcccagcgaatcacttcttttttctgaaaataccgcccttcctgaagcaatgttttcagagattttccgggaataaaactcatgaccgtatatgcattactcccaatctcaaagaagtccaacacttgcggcaggtaagaatggttcagattttttaaaatatccacttcttttcgtttctctttcaaagccattccctgatttttgatctgctttacaacaacttctttttttagccgcttatggattgccttatatacaatccctccgcttccttctcctaattttccaataatctcatatgtatccgaaaacttttccactctgctctccctctgtcccatctgctttttcttttgcattttctaatctattctaaattgaaacttctcatctgcaagataaaaaaactttccatcctccaatttttcctgactctgaatgctttttccatccacaaaagtatggttcaaagaattcaaatctttcaaaaaataaatcccattctcctcagcgatgtaagcatgccttctgctgattgccggatttccctgtatggtataatctacgtcagcagactttcctattataaatgggcttttcttcacttccatcttttcatctgtccacattcgtatcacatatgccttaccagtccaatgatttttcttattcaatggaagtatttcctctcgtatgaggatctcctcctgaaagccactctgttttctcggtggaatttccacctctgccctgtatctccattcattcagattcttttccactttttcctcacctcttctacacgatctcttgtccgctgccgtttgaatgatttcccatccctttcttttccacaattcctccgatcaagatgttcgttatcataataaattatagcaaaaatgcctttttttgccaatatcttccactttcttttctcatggaacggattatattccgacaataatctcttttctatttcattgatgtttttcataagtcatcggacttatagaaaaatgtaatttcccttttaaaatggcagagcgcagtgctataatgaatcccgtaaaaaataaattaggaatcgcagattcagaaaggtcggacaatgaatacctctcaatatattatcggcattgatcttgggggaactaacctcaaaatttctgcctatactttttctcaatttcataaactgtatgaacgacgaatcgctacccgcccaaaaaaaggctgggaatatgtcatgaaccaaattcataccgcgattttggaactatataccgtacttcctaaacaaaatgctgtctgtatcggcgtcggaattcccggactacttgatattgaaaccggcgtttctatcttttcttcgaaatttccaaagtgggaaaatatgcccgttgccagatggctgaacgagaaaacaggtcttccggtctatatagacaacgatgtccgtgtaaacctttatggagaatggctatgcggtgccggaaaacacaaaaaaaatatcgtactgctcacacttggaaccggaatcggcgccggaatcgttatagatggtcacgttctctatggtgctaccgcaagcgctggtgaaatcggacatatgaatatgttccgtcctggacgtccatgccgctgtggaagtgatggctgtctgggacgctatgtctctgcctctggtattctcgatacaataaaagaaaaaatcgccgctggaaattccacaatcatgtcagaatgggtaaatggaaatccagataaaattactgcaaaaatgatttccaacgcctatgacctcggtgaccatatggctatcgacacaatgaatgaaacgggagtcatattaggctacggacttgtaaatgtgatcaatctgttcaaccctgagattcttatcataggcggcggaatgtcggctgcaggagaacgacttttacaacctgctcgcaaaattgtagcagaacatgcgctgcgactttcccgcgaacattgtacaatcgtaactgcccagcttggtgatagtgccggaatgcttggtgctgcactttatgccagacagcggtttgagaatggaactcgtttttaaactcaaacgagtaaatgaaaataattatgaaaaaggaaataactatatggagaagctgagaaaagaaatagaaacataccttccattcaatgaacaggaagaacaagatcaaagacaatttttaagacttctagaacatatgccagatcttctcaccagagaaaacgatgttgcccacatcacagtttctgcatggatcgtaaatctagaccgcacaaaagtgctaatggcatatcataacatttaccaatcatgggcttggcttggcgggcatgcagatgggaacccggatgtcagacaagtaatccgaaaagaaattgaggaagaaagcggcctgacagacatccgcttcctcacagatgacattttttctctggaaagtctgactgtagatggacatgagaaacgtggaacgtacatttcctctcatcttcatctaaatctcacttttcttctggaagccgatgaacatttgccactccggatcaaacctgatgaaaacagccagatcggatggatcaacatatctgagattgcagaaaaatctacggaaaaatggttcgtcgatagaatttacttcaagctttgtcaaaaagttctccgggattttcctcccagagaatattataaagcatacgaggacaggtataagactattcaccaaaaaggagccagttggttcagcaatacgcccactccaatcgtgatggagctacttgaaaaatatggaatttctctctcctccccaattcttgaaattggctgtggtgaagggagagatgcgaaagctttgctggaaaaaggatattgtttgaaagccaccgatgtttctccggaagcaatttcctactgtaaagctgccttccctgaacatatttcaaattttcaaactttagactgcttgaaggatcaccatcctttctcatatacttttatctattcggttgcagtcattcatatgctcgtaccgagtaaggatcggactgatttttatcagtttatttatcagcacttaaccgagaatggtctctctctgatctgcactatgggtgatggaaaaattgagcgggagacagatatccgcaaggcttttcgtgtagaagaacgagagcatagctctggcagtatccctgtctcttccacatcatgtaaaatggtgtctttctccaccttcgaaaaagaactaaaagaaaatcgttttacgattatagaaaaaggtctcacggaatcttttccggattttccgatcctgatgtatgccctcgtaaaaaaataatatacctaagccgggattgttctgatatgtttctgtcgatcccggtcttttttggcttttttctcccccagatatcccttcctgtttttaaatacaaaaaaagacatctgctcctgcaaatatcttctctcttttctatctcttctctttttcatataccttcaaaatcacatacagtcaactacttttctaagctttttctctctccatccattctcctatcaccacttggttatgccctcgaccgattagtaacagtcagctccatacattactgcacttccacctctgtcctatctacctcgtcgtcttcaaggggtcttacaacttgcgttgggatatctcatcttgaggggggcttcacgcttagatgccttcagcgtttatcccgtcccggcttggctactctgccatgcacttggcagtgcaacagatacaccagcggccagtccaccccggtcctctcgtactaagggcagctcctctcaaatatcctacgcccacgccggatagggaccgaactgtctcacgacgttctgaacccagctcgcgtaccgctttaatgggcgaacagcccaacccttgggacctacttcagccccaggatgcgatgagccgacatcgaggtgccaaaccactccgtcgatgtgaactcttgggagtgataagcctgttatccccagggtagcttttatccgttgagcgatggcaatcccactttataccaccggatcactaagtcctactttcgtacctgctccacccgtcggtgtcgcagtcaagctcccttctgcctttgcactctttgaatggtttccgaccattctgagggaacctttgagcgcctccgataccctttcggaggcgaccgccccagtcaaactccccacctgacattgtcccccagccgggtcacggctgctggttagaaacccagtactgcaagggtggtatcccaacagcgactctgtatctactggcgtaaatacttctcagtctcccacctatcctgtacatgcaataccgaatcccagtatcaagctggagtaaagctccatggggtctttccgtcctggcgcaggtaaccagcatcttcactggtatttcaatttcaccgggtgcattgtcgagacagtgcccaaatcattacgcctttcgtgcgggtcggaacttacccgacaaggaatttcgctaccttaggaccgttatagttacggccgccgtttactggggcttaagttcaaagcttcgcttacgctaacctctccccttaaccttccagcaccgggcaggcgtcagcccatatacttcacctttcggttttgcatagacctgtgtttttgctaaacagttgcttgggccaattctctgcggccagttctcactggcactccttctcccgaagttacggagtcattttgccgagttccttaacaatgcttctcccgtcggccttaggattctctcctcatccacctgtgtcggtttacggtacgggtatgatataaacaatagcggcttttcttgacgcatggctcacgggcttccctactctcagttcggtccgcatcacgtcttcagattgagaagcggatttgccaactcctctcctacttcgcttgcaccgggctttccattcccggctcccgctctccacacgtgtccccacagttctgttatatcatagtacaggaatttcaacctgttgtccatcgactacgtctttcgacctcgccttaggccccgacttacccagagcagatcagctttactctggaaaccttagatattcggccggaaggattcccaccttcctctcgctactcattccggcattctctcttcttaaaagtccactgctccttccggtacagcttcttccctttaagaatgctcctctaccaattgatcagatcaattccacagcttcggtagtgtgtttcagccccggacattttcggcgcaggacctctcgactagtgagctattacgcactctttgaatgtatggctgcttctgagccaacatcctagttgtcttcgaaatcccacatccttttccacttaacacacattttgggaccttagctggtggtctgggctctttccctttcgactatccaacttatctcgtatagtctgactcccatacatcatctacgcggcattcggagtttgatattcttcggtaagctttgacgccccctaggaaattcagtgctctacctccgcaagactcgtatgaggctagccctaaagctatttcgaggagaaccagctatctccgggttcgattggaatttctcccctatccacacctcatccccacccttttcaacggatgtgggttcggtcctccattgccttttacggcaacttcaacctggacatggatagatcacccggtttcgggtctactctgactgacttcacgccctattcagacttggtttcccttcggctccagaccttcagtccttaacctcgccagccagcgtaactcgccggaccgttctacaaaaagtacgcggttcatcatataaagatgttccacagcttgtaaacatatggtttcaggttctctttcactcccctcccggggtccttttcacctttccttcacagtactatgcgctatcggtcactaaggagtatttagccttacggggtggtccccgctcattcccacaaggtttctcgtgtctcgtggtactctggatcctgccgtgctcgctcgcctttcatgtacggggctttcaccctctctggctggctttcccaaaaccattctactaggcttactcatcacttacgcagtccgaaccccggaatgcacgcatcccggtttgggctcttccgctttcgctcgccgctactcacagaatcgatgtttctttctcttcctccggctacttagatgtttcagttcaccgggttcccttcttaacgttatgtattggcgttaagatgacggaggtttgctccgccgggtttccccattcagatatctccggatcattggatatttgctcctccccgaagcttttcgcagcttatcacgtctttcatcggctcttagtgccaaggcatccaccatacgctctttctagcataaccaacttgcttcgtccacgggtatggactccgctacacatatctagcgtgatatgcgttggcaatagtttgttgtttttattcgttttctcgaatcagttctcatttctgctcttgcaagcttccatgatcacctcggatgtcttgatatttttcttatcatttcatttctgtatgcgattttcaaggtacatattgactgttttatcagtcattagaaacttaaatctttttcattcaaatctctaatcactggtaaatccagttgatgtttcttcctgcttttactctgctgtttgctttttattctttatttaactttatcttgaacagcacttccctgctggtcgggttgacttcgactctctttttcctgccatccagtgccatatattcccatctctgttctctatatctctatacgtaaacttcaataccttttgtatctctctattttcgtatatggcttataacagttcttctgtctccgtctgtatctatataaaaaagcttttcgcttattttcttatagatctggcagccacctgctctcccacaccgtctccagtgcagtaccatcggccgctgaggtcttaaccatcgtgttcgggatgggtacgggtgtttcccctcagcgcatcgccaccagaagcttttcgttcttttcagaacactcataactaaacaatagacttttttcaatccttacttctttcttccttagaaaggaggtgatccagccgcaccttccgatacggctaccttgttacgacttcaccccagttatcggtcccaccttcggcagctccctccttgcggttgggtcactgacttcgggcgttactgactcccatggtgtgacgggcggtgtgtacaagacccgggaacgtattcaccgcgacattctgattcgcgattactagcgattccagcttcatgtagtcgagttgcagactacaatccgaactgagacgttatttttgggatttgctcggcctcacgactctgcttccctttgtttacgccattgtagcacgtgtgtagccctgctcataaggggcatgatgatttgacgtcatccccaccttcctccaggttatccctggcagtctctccagagtgcccggccttaccgctggctactgaagataggggttgcgctcgttgcgggacttaacccaacatctcacgacacgagctgacgacaaccatgcaccacctgtctcctctgtcccgaaggaaaggcaacattacttgccggtcagagggatgtcaagagcaggtaaggttcttcgcgttgcttcgaattaaaccacatgctccaccgcttgtgcgggtccccgtcaattcctttgagtttcattcttgcgaacgtactccccaggtggactacttattgcgttggctgcggcaccgaagagctttgctccccgacacctagtagtcatcgtttacggcgtggactaccagggtatctaatcctgtttgctccccacgctttcgagcctcaacgtcagtcatcgtccagcaagccgccttcgccactggtgttcctcctaatatctacgcatttcaccgctacactaggaattccgcttgcctctccgacactctagctgcacagtttccaaagcagtcccggggttgagccccgggctttcacttcagacttgtactgccgtctacgctccctttacacccagtaaatccggataacgcttgccccctacgtattaccgcggctgctggcacgtagttagccggggcttcttagtcaggtaccgtcattttcttccctgctgatagaagtttacataccgaaatacttcatccttcacgcggcgtcgctgcatcagggtttcccccattgtgcaatattccccactgctgcctcccgtaggagtttgggccgtgtctcagtcccaatgtggccgttcaccctctcaggccggctactgatcgtcgccttggtgggccattaccccaccaactagctaatcagacgcgggtccatctcataccaccggagtttttcacactcgatcatgcgatcacgtgtgcttatgcggtattagcagtcatttctaactgttatccccctgtatgaggcaggttacccacgcgttactcacccgtccgccactcagtcacttgagcttccttccgaagaattccattcaagcgcttcgttcgacttgcatgtgttaagcacgccgccagcgttcatcctgagccaggatcaaactctcgttaaaagtgtttgtttccagtcaagaatcactactagcaatcctatcccttttactgtttttaggttgacatttctgtctgttctgaaattttctcaattgttcgaaattttcagggttgtgttgtctattgtttaattatcaatgttctgtttgttttgctctcttgcgacagctatattagattatcacatctttttatctttgtcaacaacttttttcatctttttttaaatcttttcttttgtactttcgtaactttctctgattcggtatttttcgacgttttccgttgtttctcatctgtctgctctctcgagcgctcagttatcataccattcttcgacacgaattgtcaatagtttttttattttttattttatttgtacaattcatacaattttcgcaactgcttttgacgcttctccgtgattttctatcgaaaccattgcaaaacctttctcgataggctattttttactttttcgtaaactttccacattctcctcgttttttctttcctttgagaacaaaaaacttttcactacagtggtatttgtggaaatcttttttcaaaactatgctataatatattatagaagttgacaggtacgtttcatgtgtggcaagaaatatgcccttcttcagagttatcttctctgagtaaaaaatggattctgttcattcacacaaatctcggtacataaaacagccattttcctctatgattgtaagaggatcaggattgtatctcggattcccgatcctcttcacacatcttcttttcatttttttgtatatgaaaataccaacattaaaaaagcacaaagcgccaaaccatctatccgacatcatttgtctcgggcatcatattatatttttcttgaccaagaagaatttgaatatgatctgtatatgcttcaaaagcagctggaatcggatagtttctctcaatctcttctggatgtacgaacagcatttgttctgtacattttttctccaattcatccactcttactttatatccaatcatattccattccacatgactgaaaatatgttttgccgcccccaaagcttgaatccggataggtgcaagcccgatttgtctgcaaaacgcaagcgcttcttcttcgcttaaatgtccgtctctgcctggaagttcgtacagacctgccaacagcccttttgcagggcgcttccgaattgcaattttctctccatcttgaaaaatgaaaatcgttcttttctcaattctcctggctttcgcttttgttttcaccggaagttccatcaccttgccaagctttcttgccctgcacaaatgctttactggacattcctcgcattttgccatgccatttggcacacagataagcgcaccaagttcaatcaagccctgattaaaatcacttgccgcctctttcggaatgaccccctccaacatatactctatttttgtctttgtactctgtttcataatgtcatcttcacttgccaaaattctcgataacacacgcaatacatttccatccaccgccggctttggtatcccatatgcgaacgatgcgattgcccccgccgtataacttccgattcccgaaagactacggatctgatcatactgccttgggaactctcccgaaaattcatccataatctgtcgtgcggccttctgcatatttctgacccgattgtaatatcccaatccttcccacagtttcaggagtttctcctcttctgccacggcaagcttttccaccgtaggcagctctttcataaatcgtgcataaaagggcctcaccgcttccactctcgtctgctgaagcataatctcagacacccatacccgataagcactcggatcttctcgccacggaagtgctctcttatgtttccggaaccattctacaagcggatccgcaagcgcctgaagctctttcggctccaacagaaccggaacttcctttcggatcttaatttcatctttctttacttcacaatcatacgcaacaatgtgtacgccctgttcccgcgccttttgcagcgcctccccaaactctgggtgtgtccttgtatttggtgtaaagtatttgacattcttcatctggaccacaaagaaaatatatgcttcatatccatcccgaaccgccttgcacagttcttccacatgttttactccacgctctgttggcgcatccggaaattttaccaccccatcttcctcgagtgtcacaccttttacttctataaaaattttgcgttcctcttcttctgcatataggtcaaatctggagtttccatatgtcacttcctgtctgagcatcgtgggattctcgcaaagatttcccgcttctatccactcctttacagctttatttggaatctgcgaatccatattgatcaggcgattcccttttttcacacagatcagatcccactttgtcttccgttcgggattgtcgctcctctgtacataaacagtcgccccaggaacaagcaattccgcacaccttcctgtatttttcacatgcacgatttccttcttcccctggatctcaacctctgcagtgaagcgattcggacgttccaaaaaatatcccttctctattctctcatatttcattttctactccgccagtgcacaggctttcgcccactcattctccttaaatcctggaattgcaaaatcttcccccagaagaagcggtctcttcacaagcatgccgtctgttgccaaaagctgatactgctcctcttccgtcatcgtcggaagcttatctttcaactccagttcccgatatttcattccacttgtattaaaaaatcgctttagtggaagtccactttttctgtgccattcccgcagttcctcctctgtcggattgttttcaacaatatgtctctcctcgaatgcaatcccctgctcctccagccatttttttgctttcttgcaagtagaacactttggatactctaacaataaaatactcatgtatataacctcctgattttaactttttttgataaattctgtgtgacacttcgggcaggtaatacaaatctttcctttccctttcggcacccggattttctgtttacaagacggacacttgtaaatatgatgtgtcttcctctgctcgaagtactctttttcccgcttcagaaatgtagctgcctttcctttcagttctaaaaatttttgattttcctcagccctcttctgataatttctggaaaacatccggaaataacagagaaggacaagcagacatgcgagtgtatttaaaaagttatttcgaaatcccatcgcaaaaaccaacagtactactgcggttccaagcatgaacttgctcaacgaatctaccccgtagcggcctatcataaactttctgaacttctctttcatcttccttcgcccctttgccttgttcttcctacatcttcgctgaaacattcaaaaaagtcaatccattttattgaatctttataatctacatacacttttaatagccgcctaaaacctagaaaattctgtcccgaaatcatctgctctgatcacaaaaattttccatcatataataaaaaacaggaaaaactatcttttaagcgttctctactcttctaacaatttttcctgcttctctattttcttcacttttcaactgttttataacacttttgataaaaattcctttaatctcggatgctgtggattctcaaaaaattcctgcggtgtgttgctctctttgacttgtccttcatcgatgaacagaactcttgtcgccacctctcttgcaaatcccatctcatgtgtgacaacaaccattgtcattccatcgtctgcaagctctttcatcaatccaagcacttcacccaccatctccggatccagcgctgatgtcggctcatcaaataacatcacatccggattcattgccaatgcccgcgcgattgcaatacgctgtttttgtcctcccgacagctgttttggatatgctgctgctttatccggaagtccaacacgttctaacagttcctctgctttctttgatgcctcctgctttgacagcaccccaagtttgaccggggcaagcataatattttccttgatcgtcaaatgagggaataaattaaactgttggaataccatccccattttctgtcttaatttattaatgtcacaatttttgcttgtaatattgtttccctcaaaccacacttccccgcttgtcggtacttctaaaagattcaggcagcggaggaatgtagactttccagaaccggaaggtcccactactactactttttcacctttttcaatatgttcatcaattcctctgagcacttcatgtccatgaaatgatttttttaaattcttagttatgatcaccttgcgccattctcctttcaaatagatttaaaagttttgtcaatcctaatacaatgacaagataacatactgctgctacataaagcggcggaagaatatcgtacgttgcagaaccgatatactgtgctgctttcgtcagatctgtcacagcgatcactcctgccacagatgtttctttgatcaacacgataaattcatttccaagcgccggaagaatatttttgattgcctgtggaatgatgatttccttcatagtctgaagataattcagtccaagagaacgtccggcttccatctgtcctttatcgatcgactcgattcccgcacggatgatctctgctacataagcaccggaattaattccgaagcagaccgctccaaccaaaagtgcattggtatcccgagacgtaaatataagattataaataatcaacagctgtaccataaccggtgtgcctcgaatgatcgtaatataaatgttacagattttattaaaaatccaaagctcttttctctgtacagcacttacttttactactgccactaaaagtccgatcgcaattccgatcagaatcgcaaagatggagattaatattgtaatctttaatccatccaaatatgccagatatctctggtctttgattaccgctttataaaaagcatccgagaaattttgaaaaaatcccgtcatcataattcctttcatttgttttctccttttcattgaccctcaaaggggctgccgcaaaatccagtctccccttcctgtccctatttagcttgaacacgctgggaaatccgctttttgcagcagcctcttttttagttttctctgtcttactgtcgttgccttctgaactgcttattcactctgtacatgatttgctgtgaattcttcaatttttccttcttccaccagcttatcgatcactttgttgatctcatctaacagttctttgtttcctttttttacggcgattgcatacttatcttcaaataaggttccgtctaatgttgtcagtgtatcatttgccgctaccaactcttccgccggatattgatccattacgatacagtcaatcttgccattctttaagtcttctgccgcctgcgcaaattttgtgtaacgcttcacttcttttggattacagttatctttgttggatacccagatatctgcaatatttccctgttgtactgcgacaacttttccatctaagtcagaacctgccagttcttctcctgccggagtcaccgccgggttttctttatttactacaatgacctctgtagaatttacatattcattagagaaatccatcgcttcctcacgttccggactgatagatactcctgctgccacaaaatctacttttccactctgcactgctgcaagtgctccgtcaaaatccatattcttaatctccagctctttgcccatctcatcggcgatcgcttttgcgatgtccatatcgattccgactacttcgttgcctttcatatattcatatggtgcaaatcctgcttctgttcctacgatcagtttctctgattttgccccttcttcctttccaccacatgctgccatggaaatcatcattgtccctgctaataaaattcctgctactttctttatcttcataacgcttcctccacttgttttttgtatgtttattcgtctatattgcatattatactatgttttttataaaaatcaagtggtttttgcaaatttatgcatattttatgcaaatactgtaaaatacagtagaacaagagttccaagaatgatccgataatagccaaatactttgaaatcgttcttcttaatatagcccatcaaaaacttaatcgcgatgacagataccacaaatgcgaccagacagccaaccaacagcatcgccgcttccatcgcagtaaaggaaagaccaaattttaaaatctttacaaagcttgccccgaacattaccgggattgcaaggaaaaatgtaaattctgctgctacatatcgagatgtgccgagcaaaagtgcaccaacgatcgtcgctcccgagcgagatgtaccagggatcagcgaaagtacctgccatccaccgatgagcaatgctgtctgatacgatagctgcgacagttttgtcaccttcggcatctttcctttgttccagttttctacgacaatgaataagattccgtacagaatcaacatcgcagatataatttcaggtttatgcaaatgtgcttccatccagtcatcaaacagaattcctatcacccccgccgggatacatgccacaattaccttcatccaaagctgaatcgtccacgctttctgtttctgtgttttcttcggcgaaaatggattgagcttatggaaatacagcacaacaactgccataatcgcaccaagctggatcacgacattaaacatctctttgaatgccgcactcgcctgaagtttaatgaattcgtctacgagaatcaaatgcccggtactactgattggaagccattctgtgattccttccacaataccaagcaagattacttttaacatttctaacattctttctcctcctaacctttctgaagaatcttttcaattatttttgccacaccatcttcctcattggaatctgtgacaagatctgctgcttccttgaccgcttcctgtgcatttcccatggccactccgcatcccgcctcatggatcatcgaaatatcattccacccatcaccaaatactatcatttcttcgcggcggattccgagcagctctgccagctttaacatcccctttcctttgtctactccctctgcatttacttctatattattagataatgctcttgtaactgtaacctgtcccatctgttccagttcccggagcgcacacatcttctcgctttgatctgcgaaaattgcatgcaccttatctactcctcccggcaattgtcgtgctgtctctctgatattcttgaccactttcctggtcgaacgaacatattctgccatcgcaggtgattccatcatctgatctactctttgcagatcatgctcactgatatagccgacaccttggaagtaaatctcttgtaatgtatcatatttatcatagatatccaatatcttttctgtaatttcttttgggaccggcttctcgtacactatagtcccatcctttgcatctacgatccttgctccatttgaagtcagtgcataccgtattcctttcacttccataatttcctttggaattcccgaaaacggtctgccggtcgcaggaagtacgatcatcccttgtgcaatcgcctcctccaacgccctcttggtacgtgctgtcagtttcttttctcccgttaggattgttccatccagatcaaaccctaataatttatattccattttcatgatgtctatcccttccttttctcgctctatttctttgctccttttctcaccattcaagttttgtctattttatcaaacattgaaaaagaaatcaatttatactataatgtagggcattaagcataccgaatgcaacttttaagaaaggactccgaaacacatgtatggttatcacaaaaaacgatatcaccgcctttgtatctgccttctgtctgtgatattttctatttcctgccctgtctatgcagcggacactcctccttcctcagacacactgtcagcacacaatacattgctgcttgatactgcacaatcactcagcacaatgactgaccgcacagaagaaatgaaaaatttgcttatagatgcacaaatccaagaagccagacaatatcaaatgatgcggctgcgaattcagtggctctatgaaacaggctattcttccttcttggagcagctgcttagtgcctctgattttccagattttctaaatcgctctgaacagatccgctcgctcatcacctatgacaggaatcagctcacagagctttctaaccttcgcagttctatcgagacagatgccgcgctcctcacaaaacagtgtgacttactgcgcgcttccagagatgcactgtccatggaatacgaaaagcttcttattcttttgaatcagcaaaatactgcttccggtgtatccgttttccctgaagtattcagccgaattcccgaactgattgcccgtgctgatgaacaaatcgaagaaggacaacttgccgccgatcagggaatccatgctccttcttcggaaatccgcgacccagagccacctctgaacaatgatatttccgataacacttctaacgtggcagacaacgaaagtaccgtggatgagaaagaggaagatgacgaaatcgcccctccaccttttgctcctcctccgtctttctcggtatctgcctctgaaagtctgcttctctctgcgttagtacagtgtgaagcaggtacgggagactatactgccatgactgcacttgcatcctgcattctcaaccgggtaagcagtccactgtttccgaattcaatttcaggtgtcatcgaatcagaaccactgttttcctctgtatctgacggaagaatcgaggcactcctctacggggatattgactctgtatgccaaaatgcagtttttgatgcgatatccggtacgaacccaattggcagctgtctgtacttttcacctgcttcctcctctgcttccggagcgacgtttggaagctttacattttattaatttgcatattttatgattttattgtataatagacaaacaggttatgtactaatgtgaaaggaaaatatggcatgaatacaaaagtaaagcgcatgatgcgtacattgctcagctgcacacttgcagtttcaatgtatcttccatgcaccaatgtgtatgctactgacacggtcgacaacctcgagaagaagacaaatgagctctccagtgagctctctaaagtaaatgaagaattgtctactctcagcagtgaactagattctaccatttctaaagtagagtctaccactaacgcaatcgaacttaccaaagtcagtctcgcagatgcacaggcaaaagaagttcagcagtacagcgatatgaagcttcgtatcaaatatatttacgaagccggagatctttcttttttagaattgctcttttctgctgaagatatgaccgatttgttgaacaaagccgatttcattcaaaacatcagttcttatgatcgcaagatgttggacgaactgcataacaccaaagtagaaatccaaaagcaacagacactcctggaagatgagaaagacgcactggtcactctccagacacagatggaccagaagtgcaacgatctccaggcaaaagcagcttcaacaagcactgagcttaataattattctgatcagttggcacgtgcaaaagccgctgccgaagcagccgcaagagcagccgaagaacagcaacgtctcgagcaagaacttgcacagcagcagcaacagcagcctgctcctagcccaagtgttcctgatcagccagtgactcctcctgtgagtccagaaccaagtccgcaactgccggattccggaaatactactccgccatcaggtacaagcctcggagtatttaaaattacacactattgtgcctgctccatctgctgtggagaatacagcaatggaattactgccagcggcaccactgcacaggcaggaagaactatcgcggttgacccttctttgattccacttggaagttccgtagtgatcaacggacatacctatgtcgcagaagatacggggggcgctatcaaaggaaaccgcattgatgtttttgtcagcagtcacagtgaagctctcgcaaatggtgtttattacgcagaggtcattttacaataacaactattgaaaactgaatatcgaaaaactgaatattgcgaaacttaataataaatagcacgaaaaagtacataaagtgggagaactgtcatctttcagttctcaaaaaaggattccggatcggggcttaccgcctctttccggaatcctttttctatgcatattattgataatcgaatacatcgatccatttcatcaggaactctttctccatctcattttccttagaaagttgtgccgctgctacaatcggaagccactgttgcacatactgctttgcagtatcactcttcttgcagaataacttcaaatagaggtctgcctttttctggtccttcagcgcaaataggagataagtcatcgctgcgtctgcacttgcatttccctgcgtagcatgcgcccagtcaatcactgtcatctttccagttttaccgacgatcacattacttggattgaagtctccatggcatactttgtcatgctttggcatactctcaagtcttgtaagcaattcatatcttgctgtcgcatccagatccttcagttcgttgatctgccgtgcaagcttatctttcaacttattcaaaagaggatttctcttgctctgtacctggagctggagatctacaaagtcttccatatacttctcaagatttgccggatcgacattcatcatctcttccaatgtctttccctctttgcattcgatcacaagtgaccatcttccgtcaatctgtgtcacctgttttacctttggaatatcaagaccagtcgcctctacccttgcggtattcaacgcttcattaaatacatctgcctttggatgttctttcccaaaaatctttacaattccctcttctgttttatacacttctttgtgtgcacgttttacgattaagttgctctgctctaacttcatgtaggttccctcctaataatacaattctactgtcattgttcgcagactgtatccgaactgcaacaaaataatctgtaaacaacttcaatattttttattgttctgatttgatattgctattatataccttttcaaacgatttgaaaagggttttttgtataatttttaacatttttttatgtgctatttttattgttattttattatcaatctaaacttatgcacttatctatttattactagaagtttctcctactctcccctttggcaaaagctccaaaatcctctctgcaacttcatccggggttgcattttcctgcggtgatgtacagatatacttcggataactactgtcttttaacccttcgattaagatgatatcggcctccgggaaaaaaggaagcagcatttctgcagtaatttccggaacccgttttgtgacaagaaactgactttttgaaaacaccgctgttccataggcaccagctttatgatgctgatagctatcggttcccggcacatcactctcaaattcatgcccgtcatgcttgatgactgccacctgatatcccttttcagttagaatcggaattattcctgtaatcagtgttgtctttcctgtatttttatagccactcacggcaaaaattaccggctggataacattcttacccatactttctcccctttctttcgtccctctccaatcccaggcggaatttccaacagacaattgcaaccattgagcgaacttaagattcctgaggcattttgccttttccacactaccgttccattctcccatctcgcccgtacaaaccgcggcactttcccggtcttttcaaaggtttctgccaaggttccttccctgtactctacccggtatctctggcttcccgtcatcttttctaacaccggaagcacaaataattccatattaacaaaagtaccatatggatttcccgaaaaactaagcatcgggattttctgatagcttccgcccatcatcggggatcctggcttcatcctcactccgtggaaacagatctctgcaccaagaagtccatatgtttcctccacaatatccttctgcccaaccgatacaccgccaattgtcagaatcaagtctgcatccagcctacatgccttctctatggaatctttaagacaccgagcatcatcttgcacggtatccatccacactactgatactccaagctctgtaagcctgctacacacaagatacagattcgcattataaattttgccgaacgacaattcgcttcccggctctgtcagctcactcccggttgctatcaccgccgcacgcacattgcgcaccacttttgcatgagaataccccatcgaggcaagtagtccacactctgcggcgcctacggtttccccacgcgttaacagacaggtgcccgctgaataatcttcccccgcataacaataattttcataggcatgctgttcttgaaaaacagagatcgtgtcccccactctctccacatcctcctgacgaatcacagtatctgtcccctgtggaatcggcgcacctgtcatcagacgtaccgcctctttttctcctactttcttctccgaagcttcccctgcataaatcgtatcgatcacatgcagaaagactccgtgtgtatcatccgctccgatgctgtcttgacttcggattgcataaccgtccagaggggatctcggaaatggaggctgggcatgtctgctatatacatcttcccatagcgtgcgcccggaaagttccaaaagtggaagttcctcccacgcatccagcgggcgtacttcctccaaaattttttctacagcctctttcagagaaatcctcaccagctcttttctttctattttacttaaatatgcccgatactcttcttctgtattaatattgccacccccatctctttcgtcttccaaacagacaatcttctcctctatctcgttcaaaagatttttcagtttataatcttttcgttccaactgccgtcggatccatggaagcatctccttcgtatagatgcctggaaatggacatctcttcccatctcttataagaaaaaccggctttctctcacgaacccattcgcctctcatagtatctactaattcctgatccacttccggcatatcgcatggtacaaaaagaactgcctgctcctcacaggccgtaagaacactgtaaatcccaccaagaggtcctttttctttttccaaatcttccacaagcggaaatccctcaaagccacactcgccaacatctgcttgtgtttgttcgtatttcttccggtcttccacagaaatataaatggcagaacatccacttaattttgcagcaatcttcttccaaaatacggtttcttccaccggcaaaaatgctttttttctgccattcatacggctgttttttccacctgccaagatacatgctgcgatatcagccttcctatctctgtcttttcccttagccatcgaccttctcccatgtgatcgcacccggataacaagtccggacacatgcaggttctcgtccctctttgatccgttccacacagccgtcacatttttccatctttcctgcttcattaaagtggatcacctgaagcggacagactgcctcacaacttctgcatccattgcaaaggtcctgatctacgagaataaaacctgtcgttttttcccggtaaattgcgtgttgcgggcagacatgctcacattttccacagtgaatgcaccctggacacactgttttttcaaatgtccctgataaatctgtcaccttctgaaatgcccggaaactcggcacaatttcccctacagagtgatgtgcatccagacaggctatatggcatgcatagcatccgatacatttttctttatcaaatttcagtcgatatggcatcttcctcttcctttcttcttacattacaaaaataactcttatatcccggaaatccggaaatcggatcgagataggtaagcggaatcagctcattcgcttctcccttcttgtttccatggtaaatatgtaccatccccggcagattgtttctgacggctgccgcaattccttccatgcttcctcctggcgaagtcactattactcggtcgccttcctgaatctgaagtgattccatatcggatggatgcatttccaccaaagtcgccggttccaacgccgcaagccatggaagacggttcacacgtgcatgaaaatactgaggttttctggaacctgtattcaggatccacggataaactgttctgtccacctcacttacttctctgaaatcccggtaaaccggaagaccgtcatacccataagcatccttatatttttctaacaccgtagagacaaattctgctttccctgtcggtgtagcaaatccctctctctcataacttctctctgtcccgaataccaaatgttttgcctttactcctccttgatgtccgcgcaattcctccacagaaagtccggtcggtttgagaatgtaatccatatattcctcataggttccagaaagcaccggttcagaaagtcccattctgcgtgccaattcttgaatgatctcaatgtcattttttgcctctccgcacggacagactgctgcttctgaaagaccgaccatacctcctcgcattgtccttatttcttcccgttcaaaaaaggttgccgcaggcagcacaatatctgccatatcgctagagtcagaaagaaacagatctacattgacataaaactctaattttttcagtgcctcctgaagatacgacggcttcggccacattctgtggttcattccaaatgccacaagtgctttcagcggatacggttcttctttcaaaatatattctgccagtcttgtgcactgagcctcctcacacggaagcgcaaaccatgccggaaagtctttctgaccaattgcttcctcgccatcgtatctcttcactttcccaaattcattgaccggagcagacaccggtggccttgccagatgtccgccttttctgtcgtaatttccactaagtcctacaagtgtatgaaccgcccgataattctgtactccattgatatgatgtacgaccgtcgccgcggagaacatgattcccgccggaccatttgtcgcatacagccttgcagcctccaaaattttctctgccggaactccggtgatcttctctgtatactccggagtaaactgctttacatatgcccggtattcttcaaacccgtgaacatacttttccacaaactcatggtcatacagatcctcttctatcatcacctgtgccattccaagcgcaagtgctccgtctgttcccggaagcaggcgcaaatggatatctgcctctcttgccgtgaccgtgtttcttggatctaccacaataatcttgacccctcgtgccttcattccccgatagcttttgctcatcggtgtattagagtgatataagttggaggcccacagcataactgtattggcatttgccagatccggaaagcaaatatcatttccatagatggacttccacgccatattagatgcctgaaagcaagtgcttgactcggtacaataattcggtgatccatacgcatttgcaagacggagcaatgccggacgataccatttcggatatcctgcataaaaaatcgtcgaccgtgcaccgtactgttcccggactgacagtaatttctctgcgattgtctgatatgcttcttcccagctgattctaacaaactttccatgtcctttttccccaacttgtttcatcggataaagcaatctttcctgattatatatgtactgtcttgcagctgcccccttcgcacaaagtcctccgctctgtccaggcagatttttgcttccttctaccgaaataatctttccatcttctacatagacatccattgggcagccggacgcacagataccacagactgctttttttacctgtttctttccatgttctttctgactcaatatcgttcctccctctttctttcattctctacttatctcaatctctcgaaaaaagctactgttttatttatagaaataaccgagaatccacgaactgtgaactcccggtattctgatttcctattttgtttcttccgctgccttcactgcaaaagattcatcaatcaaatctcctttatccactggttctttgattaaccctgaatccatcgccatccggttgattgcctgtacaccactgtcagagaaaattccatctgtagaccagatactattttctttacactcttttactgcattttccaacatgtcattttctgcaaacaactcttttaatgtttttacaatctcttctgtactgctgttttcaagatactgtgcacccttgtaacatgcacttacaaatgcctgtgtaatctcaggattctgctcaatgtaactcttctttccaaatacaatatacatctcatagctttccgaatcaagcagttctttgtgtacttctttgtcataaatatcaacagaaacttcatatcctgcttcaatcagctgcgctcttaattctggtgatgcataggttgcagaaatctctccactttctaacgccgcaatcacagcactatttttcatatttacataattcacatcattatctggatccattccttcattactgataatacttctgacaaaagctctcggagaagaaccactatctgctccatttacatttttccctttcaaatcttttacagatgttacatcttttccaaggaaaaatgaatatggataggtatcggtacatgtataaattaattctgtatcctgtccttcctccacgaatttacaaatcatttctggaccatacagaccaaattgtgcttcattcgcaagcactggtgctgtaggcatatcactttgcacagtcgtaatttctacatcaagaccttcctcttcaaaataaccaagtgcctcagcagcatataccggtgcccacaaaattcctcttgtaggttcgcagacagaaatttttgttaattctgtctctttcttttcttctttttgtgtagaactactttttgctgtctctaccttttcttctgtttttttcgtgccacatcctactgctcctgctgctaccatacatacagcaagtcccagtgcaactaacctctttttcattgttatttctcctctttcttatgatttatcgacagacggtctccattttaaaaccgacttatcaatcctttttacgattgcatctaaaataaacataattaccattaaaacaagcacacatgcaatcacccttgtaatattataatatcctcctgctgtttgaatgatccagccaagccctgccgatgctcctagatattctccaacaatcgctcccaaaactgctgctcccactcctgcttttaaactggctatcaaccatggaatacaagaaggcataatcactttcaacataatctgaagcttagatgctctcataagtttcagtgtattgattaattgtacatcaacatctttcactcccgcatacacattaaaaaatacaaggaaaaagacattgatcgtcgccataaaaatcttggatttcatcccgattccaaaccatacaacaaacaatggtcctaatgccagaagcggcagtccgtggattcccacaaatacaggttccaaaatatttatgagcaccttattgtttcccactaaaaatgccgtaagtgtaccaaacacaattccataaaacaagccaagaaaagctgcacataatgttactttcaaatgcgggaaaatatatccgcttccaaacatttcctttaaatcttgccatactgcttttggagaactaaagaacatctgattgatcattcctttctccgaaaggaactgccaaataacgacaaggatcacaaggagcgaacataagattacccttgattttagcttcgttttatccacgccttttcctcctcttcttcggtatcatcaaaccgtaattcatctttaatatcgctccaaatctgtttctccagtttcaaaaactctggatcatacttacattcttcaatatttctcggcctcggaatgtccacaatatactctgccttaattcgtgacggacgataactcaataatacgattcgatctgcaagcgtgatcgcttctgaaatatcatgcgtaatatagataattgtattttttcgttccatccacatcttcaaaatctcaccttgaagcttttctcgcgtaaatacatcaagcggaccaaatggttcatccatataaataatatctggattttgtgccagagctcgaataatcactgcacgttttctcatcccaccagataattcaaatggatatttcttctcaaatccttccaatccacttgtcttcatcaattctctcgctcttttgatccgttcttcttttttaattccttcgatttcaagtccaagtgcaacattggactcaattgttctccacggaagaagtgtatctgtctgagaaatatatccaattttatggtcagatttctcaatggactccccatcaatcaatacctccccttttgttggtgcgaacattccacacataatgttgagtaatgtacttttcccacatccacttgccccgacaattgctaaaaattctccttcttttacatcaatactgatatcctcaatcgcctttgtttcttcccccgtcgctgaataatatgtgtgttgaattcctttcaacgacatctttattttttcagtatgtttcactctggttccttcctgcatcttaacacctatctccaagtattctttctgcttctcttgctgctcttatcattgctcgcatattttccggtggagtattccccgggaggccacagtctgcactcaggataaatccgcctccctctgctgccgtcagacactgttgcaaactttcctgatatacttcttccgcagatttcatcagcattgtaaatgcagcaggcacttgccccattaacgcaattttctttccatattccttttttaatgtttctaaatccgcttcagacacatgcaaagcatccgctccttctttgcttgcaacatcaaatctgtcattccagttgccacaagtgtgtaaaataatcttcgctcccgtttttctgattttttcgataaattgcttattataaggaagacatgactctacataatgctttttagacatacaagtaccaccaagtgtcggcatcggaagccatacaatatcacatcctgcttctaccaaccttgctacactctgtgcaattggttccattaaaagttctgtcacttcacggacaaacttcttattttttatcaaagatacataaaaattggccccatccatcattgctgctgctgacatcgatgggttgtctgcgatcgccatcaccggacaatccggatccatctgtttcaagaatcgaactttctccatcatgatacgcaaagattcgcattcatcaatgttgtatgcatgaagtttctcaatatccttctcttttaacacagtccgttctccattgacagaaactttcccgcttttatctatcagaccctttcccatctcttctacaacaccttgaaaacatcccaccgcattggcatcatacccaaacttcttcctaacctctacgtttgcaagagcaaatacttctggattctgttcatactctttcggcgaatagctacattgatttgcaacaaaagcagaagcagtcggaatcactggaatatatcctgtcttttccaattgcaatgttttttttactttttcagtaattgtcaattctctcatacctattctccttatttcccctcacagtattgttttgcagcttttactgtgtccatcgcacttacgcaaaacatatctgcacctattttctcacgaaactcctctgtaatgactgcccctccgatcatcactttcactttatccctaaggccttcttttttcagcagttcaatcgtatctcccattgctcccatcgttgaagtcagcagtgcagacattgcaacaatatccgtgtcatgttctttgacatgacatacaaattgttccggtgctacatcatgtcctaaatccgtaactccaaatccagatgcctccaaaagcgatgccacaatatttttcccaatatcatgcgtatccccttccactgttccaattactacatttccatatcttcttgtctgacttttagaaatatatggcagtaacatatccattccctgattcataatttccagtccatagagaagttccggaataaaatattccccctcctgatataacgctccgacattctcaattcctgggatcaaagcccgatttacaatttcaatcggctcttctcctacctcaagtaatttttcaatataccctagcatcccctcttcttctagatcagagatgcactccttaattttctctatgtaatccattccacattccctctttgtccttttatataatacaatgctctatataagataatatatttctttaattttccagtcaaatcaatattttttatatacttattcgctttatctatctgttttaggtattgacaaagcaaactaaattaattaaaatagcaacatgaacgctgttcattttgaaaataaggcttcatcagtcaggttaaaaacactattattcacaaaaacattaggaggttattttatgcaggcaatagttgaaacagtatttgacgcatgttatcttataggggtcgttacattgggaattcttatgattgctaaaagtcatgggaataagcagtaccgcctctttggaattatggcagttgtattaggattcggagatgcatttcacctggttccgagagcagttgcattatgtacaacaggattagacaatttcacagttgcattgggaacaggtaaatttattacctctatcacaatgaccgtattttatatcattctatattatatttggcgaatcagataccatgtaaaagggaaaaatatctatactatattcgtatatggtatggcaatagctagaattgtcctgtgtctgtttccacagaatgcctggacaagttcagcatctccattatcgtggggaatttatagaaatattcctttcacaattatgggtcttattattatttatctattttataaaagttctagagagcaaaatgataaactattcaaaaatatgtggctgacaatcgtcattagctttgggttttatttgcctgttgtattatttgccgatcttgtgcctatcattggaatgttgatgatccccaaaacattagcatatgtttggactgtttggattggatatcacgccatgaaagctgaacagcaataatcacaaaaaagacagaagacactgactttcgtcagtcctcctgtctttttctaatgcccttttcagccttacgtcttctttttccctaaccaggtagctactactatctttcctgaaattagtttccgtagtaaactcttaagtacatttctttgatttctttcatcagtggatatcttgggtttgcacctgtacactgatcatcaaatgcctgttctaccatttcatctaatgtatccaggaagtatttttcatctactccgtattctttgatcgtctttttgattccaactgctgcttttaattcatcgatcttctcaaggaatttttcaaatgtttctttgtcgtcttttcctacaacgccaacgaatctagcgcattctgcatatctttctaatgcgtgtggatactgatactgagagaatgttcccatctttgtaggcacgtctgttgcattgaatttcattacttcgttgatcagtaacgcatttgcaacaccgtgtggtaagtggtggaatgctcctaatttgtgtgccattgagtgacatactcctaagaatgcatttgcgaatgccatacctgccatgcaggaagcatctgccattttctctcttgcgatcggatcgtttgctccgttttcataagcagatggtaaatatttgaagatatttttcattgcttttaatgcaagaccatctgtatagtctgttgccatgatagatgcatatgcctctaatgcatgtgtaagtgcatcaataccggaagcacttgtcagtccttttggctggctcatcatattatcagcatcgatgatcgccatcttcggtaataattcgtagtctgctaatggatattttactccagtcttttcatctgtgataactgcaaatggtgtcacctcagaacctgttcctgaagatgtcgggattgcaacgaagtaagccttctctcccattttcgggaatgtatatactctcttacggatatccatgaaacgcattgccatatcaaggaagtctgcttctggatgttcgtacattacccacataatctttccggcatccattgcggatccaccaccaagagcgatgatcacatctggctggaacgctgtcattgctgctgcacctgcttttgcacattccagtgtcgggtctggagctacttcatagaagcatgtgtgctggattcccatttcatctaatttttcttcgataccttttacatatccattgtggtataagaagctgtctgttacgatgaatgctttctttttgcccatcactgttcccagttcatcaagagcaaccggcatacatccttttttgaaataaactttttcaggaactctgaaccaaagcatgttttctctcctctcggcaactgtcttcacgttgatcaaatgttttactcctacgttctcagatacagagtttcctccccaagaaccacatcccaatgtaagagacggagctaatttgaagttgtaaagatcaccgattccaccttgagaagaaggtgtgttgacaaggatacggcatgtcttcatagctgctgcatgttttgcaagcttctctgtctctgcagggtgtacataaatggaagctgtatgtccatatccaccgtcagctactaactgctctgcctttgcgatcgcttcgtcaaatgtctttgctttgtacattgcaagtaccggagataatttctcgtgtgcaaattcttctgagatatctacagattctacttcaccgatcagaatctttgtatcttccggaacatccactcctgccaatgctgcgattgtgtgagcagactgtcctacgatttttgcatttaatgcaccgttgatgatgattgtcttacgaactttttcaatctcatcttttttgaggaagtagcatcctctgtatgcaaattcttctttcacttctttatatactttttccagaactgtcacagactgctctgaagcacagatcataccattatcaaatgtctttgaatgaatgatagagtttactgcgagcttcacatctgctgtgtcatcgatgataaccggtgtgttaccagctccaactccgagtgccggctttcctgaagagtaagctgcttttaccattccaggaccacctgttgcaaggatgatgtctgcatttttcataacttcatttgtaagctccagtgatggtacatcgatccatccgatgattccttccggtgctcctgcctttacagctgcatctaaaactacttttgctgctgcgatcgtagctgcttttgcacgtggatgtgggctgatgatgattgcatttcttgtctttaaggaaatcaatgtcttaaagattgctgtagatgttgggtttgttgtcggaataaccgctgcaacaagaccaattggctctgcgatcttcttgattccgaatgctttatcttcctcaatcacaccacatgtttttgtatctttatatgcattgtaaatatattctgctgcatagtgatttttaattactttatcttcaacgattcccattccagtttcttctactgccatttttgctaatgggatacgcattttatttgctgccaaagctgcttcaaaaaagattttatctacctgctcttgtgtaaatgtagcaaattctctctgtgcttcacgcattgcttccatttttgctgtaagagcttctacactgtcaataattgctggtactacttcttttttctttgccataccaatttttcctcctgtaaatgagttaagtaaattcttttctatatcccctagtatattttctcgttaaaaaaatgtcaatagaaaaattgatatttttttaactatcattgtttttcttatattttgacgaaaatgattgttttctctatctttttcttgtgcatttcacacgcaaaaagcaaattggttttcacaagcgtttttttattgttaaaaataattcgaactcttccacttttccccagcaagaccaacccatactatataaattttctcacaaaatgagtaattccttttccagattatgctatactgatatagaaacagtaaacctttgtatggcaaacttttgccgttcaagacaatctcaactactagcaggaggaaacaaattgaaacttgtcatttatggaacagacacttgtaaagactgtgtagatgcaaaagcgctgcttgatgcaaaagggattcgctatctctttcttgaattttctgacagcatcgggaatctcaaacgcttcttaaaaatccgtgataccaatccaatgtttgatgcagtaaaggaaaagggtggcgttggagtcccactctttgtgctggaagacggaacgatgaccttcgatgtaaatgaggtcataagcaaaatagaaaacgcatagcagcccatctcaaaacaaggaaaagatgtagcctttcccttctttgtccataaatctcctctctcggaaattcatggagaaagaattttaaaactacatctttttcttctccagttttcttatatttgaaaaatttacttttcaggttacttctatattcaccattctagcgtcagttcctgaagttttgtaattcttttttgctcataatcgagcaggatctcaattttgtactgtttctgcatcagatgtaccataaatttccggtagcctctatctcttcaacggaatccgcgtaaaatattctgcttcattctcatgatgaatataagctccatttttcttctgcacgttcagggaagccagattatctttatgtaccgaaagatagatttcctcctcaggcacgatttttcttgcaatttccaacagcatttccagacctttggctgcatatccttttccccggtactttggagaaatcccataaccgatatgaccagctccatgaatgagtccctccgtcaagcgatgccgtaaattgaaaattccaacgtattctccctccgtttccagaaggtatacagtatccggtacaaatccttccggaagattcactccttctgaattctgcttcccaaagtttgatcagtttcatctcttctcaccgcattcttctttttgctgattctaacataacgggttaagaaaagaaagtttttgtttatcctctcatctcgttttcaatatattctatatactctcttctctctacctcttctttgttttcacaataccacgcaaatgcctctcgcaatccttcatagaaatctttcacatccggcagtagttccttctgctttttgacatccagcacatactcatatgccggaaagcaaaaataatctgtctggcaaaactgatcccctataagccgcactctcaatggttctcctgctgcctgataacacagctccacaaaggtacgaatatctattgcctcatttcccacattaaaaatatgctcttctggtcttttctcaagaatagcttccatcaatctgcacaaatcctccacatggaaaaattgaagcttctggcttccatcccccggcatataaaattttctgtgctgcaatgcacaatcaaatacaaaggcttcccggtaaacatcgttcatcgacccatacagatatggaggacggatcacataggcatccggcactttctccatcaaatactcctccgcctcaattttatcacttccatattttctccagatagaattgtatcctaccggctgctcctctgaaaaaggctgcggcaatgtctcagggtataccgcactggaactgatcaggatataagtggaaaatcccttcaactccgcaagaagatttttcacatcttccttcgtatatgcagtaatatccaacacatgatcaaaatttttcccctgcagcactccattcagctgattccggtctgcacagatccactcaactcctgagacctgcggcctcgatccccggttcagcacagatacctcataccctcgttttacaaaatattctgctgcaaatttacttacaaaaaccgttccgcctgtaattaatattcgttttcccatttccattgtctcctctattatcccatcgttcttcttccgttattttacttcgtactttcttactgcttccttttattatgggaaattttatcataagatattttgaaaatctagttttctaaaataaaaaactcccgtaaaaacatacgaaagcatctgtttctacaagagttttctattctaaaaaaagggaaaaatcagcatcagcctctctttcccctctttttaaacactatgagatttcatcttacagttctcagctataatcgtcaacaattttcctaaaactgccatccattgaacttaaatgttgtaggtgatacgttctcaggatcatagcgttttaacatttcttcataccgttctttataatcattgtcaatttctgcctgtgggattactttacttgcctcatgaaggaagtggaaggaatctcttcccatctcttgtccgcggcgtgtatgtttatccaaagccacatccggaatctccggaagctctcccatggcaaatcctttgatacagatatttttgagtaagtcactggatctgtctttctgtgactgaacgagataccggatcgcatgaataaagtagatcgggcggtctccgtctgcatagtcaaattcttttctcatttggaacagactgttcactacaactgccgccatcggatttcccattccaatatcttctacggaaatcgtaaggagtcgtctccacatcttctcttctaactccggtgatgtaatatacaactcatatgcgaacttgcatgcgtcttcttcatttgcacgtcggatactcttctgtaatgcagaaatcacttcatcacaacaatatccattccgtgttgtgatcgactgccacggatcatacattgtcttttttaccattcgaaatcatcctcctcttcggcctcttttgtttctttctctactgcctgtttttcatataccttaaagaatgggtaataaatcagcacactcaatgcgatacataagaacataaaaattacatttctaaaatccattccggacatccatccttggataaaaaatggaataaaggaagggtctgcaacatatcctggtgtaatccatccaaatacctgcgcataatatccaagtacaacacaaatagatggtgtgaaaatatatggaattgcaagaactggattgtaagtcatcggcactccaaatgtaatcggctcattgatggaacagattcccggtacaatagagattcgtgcaagcgatttcagctttgcggattttgatttccacatcagtaagatcaaaccgagtgttcctccggctcctccgagcattgcgtagcggaataactgaaggttcatcggattggtcggtgcaagcccttctgctacaagagctgcatttgctcctgttccagcaagtccaatcataaatacgattgaaaatacaacagatgttccattgataccaaaaaaccataaaatatttgaaaacataatgattccggcatacacccagatattatttccgacatcgatcgcaggtgtaagtaagctcatgatcgcctctggaatagattttccgatcaaagagattaaaatcagattgatgccatatacaataacaatatttacaaaaagtggaagcaatgagtttacaaatgtagcaaccatacttggtaccgatgctggaaatttaaccttaattcccagtttgtccaccatgcggttaatctcaacacatacaaaactcaacactaatgcaatgaacaatccatcacttgtcaaatactgggatgtaattgctgaaatcgcagcatcttctcccaccggaacttgaaccactttggaacatacaagtaaaaatacagacattgacataataccattgactgccgcattcatcttgtaactctttgccaaacaataggcaaccgaaaatgcagtcatcaatcccagcattccaaacgtcatattatatggcgcaagaatccattcgctgtttgctactgcccactctttccaattaattaaaaaacggataaaaagattggttgtattcatatctaccgtttctaaattaatcggaggattattcaagatcataaaaatagaaccaatgacaagcaatggcagtgtcatcatcataccatttgacaatgcctgcaaatgtctttgattacccagtttcgcccccaaaggagataaatatttttccaaaaaacctgtgaattttttcataagtatatatcctttgcctctccgtttactcttttatttcccaactgctctcatcattttgattgcagtttttaaaactttctctccattcatcattccataatcacctgaatcgatcactgcaatcggaattcctgtctttccatattctttcactgtctgatcgtacagatatttcacttgtggtccgagcaaaatacaatctggatgttttgctgcgattatctctccgatctgctcatgtggaaatgctgcgacttccatatctaattggtgtgaatttgcaacttcctgcatctttgcagccagcatacttgttgacatccctgcactacaaaataagtacacttttttcatatctttttcctctcttttatgcttcttttgcttctaaaatggaaattcgtctgtaagcatccatcaattccactgccagaatcttgcacgtctccgctgccatcaactgatcctccgcatgaatcaacaataaatttggtgtttgctccatctctccggcggcttccttatggatcagatctgcatgaaccttatgtgcctgcaaaaatgcatctccaccctctttgatcaacttctccgcctcttcatagtttccttgttttgctgtttgaatcgctcccatataagcacttctcgcttctcccgcaaaagaaataatctgaaaacaaaccagctcaagttcttccatcttctgcacctcctaacctttacttaaagtatatcgtagatttttttattttcttccaatgtttcttcctagtattaggaaatgctgtctgtttttagaaacatgctgccccttacaaaagtgtattcacaaagctctgataatcctgaacttccaaaagtctcgcaaatttctcaggattggaaacgatatcatccagccagtcaaagaaaatctttaaaaaatttctattttcttctgtgattgccaacaacagtacaaaccgcacctcataactcccccattggaccggctgctttaaaattgcagtgctgattgcagaatgaattgtctcctgatgagacatattgtgcggtattgcaaaaccatgaaaaaaagatgttggagaaagacgttctcttttcagtactccctccttaaaattttcttttacatacccacgggcatacagtttatcacacatatccgatataatcttttccggttcttctactgccatatttgctgtaaaaaactcttctctgatcagattcaaaataaaaaactgaaaattatttctataacggatctgatctaatctattcaatgtctgaaaaacagctgcttcatctgtatgagcaaaaaacatagatatttctgttgtctcaatatccagagcatgtgccaccggttgtgtcgtcagtatcaaatcgagatttttctccctgataagtgattcttcaaaatagctcatacaacccacaatttccatacgatcctgaaaacggttcacgattttctgtatgcacaaatcctttactgtctgattgtgaggacatattaacaagcatctgtattttcgtcttaaatttgctctttcatatgcggatccaagatgtaatgcaataaaagaaatctcattttcactgatgatgatattcaaatgttcttccataatcttgcatacccacactcccatctcaaagatgagggggtattttctcttcacttcttccaggcatgtatgatcaatctcaacatttgcatagtgtctctttaatagggaaactgtatgtacttccagtccaagtctgaattcacaatcttcactgaaatcaatatcaaaatgttcccgaatctcaacgataatatgctgtaccaaatccgaagctaatccttgtagctgttcttcttcacaatatccttttctttttccatgttccaaataaatggcaaaatcacagatctctgcctcccgaacttgtaaagacagtctagcgccgattttttcaaaaaaatgtcgggaaatttcatattcctctcttccatatttcccctgctgctcttcatcctcttttaaaaaatgacaagcaaagtttctttccaaaatcactcctacatggatcaatagagtaggaatccttacttcattcatttgataatgaaattcctcaaaaatatcttttaaaagctcctttactttcaggagatcaaagcgcataaaattttctgcaactttatttaaattccacagattgccgctgatcttataggagatcaactcttcatataaatgtctcttttcccgttctcctccggaaagttgcagcatattactttgacggattacctttaacccttgataattgtccagtaattttcggattttattcatatcattttccagtgaaaactctgaaatacacatctggtctgctaactgatatatatttacctgattatgctccaccaatgttttcaggatcagccatcttctttcttcccctgtctccggaatttccttttttgtctcttctataaatctttttactttttctccctgaatccggtatcctttccggatattagattcaatcatcgtatctgcgtaaaactcattgatcgcagcaatatcattgcggattgtccgatcagatacattcaataattttgcaagatcttttcctacgatccaatccttttgattgttcatgatggtcataatcatattttgtcttttggtcagcatgggcaccctcccgttctctctgagatcattagatcattctcattcatctcttccatgatatcgggtcggagaagtgctgtcaatgtaccaagtagctcatttgaattctctatctgtactcctgcgaacttaaaaagtgattctaaaaatagaaaaagtccataatatcactttttcaaaatgatatcacagactttttcttaaaatctttttagggtcaggatatgtgcctactagcatcccgaagaacataccggtgaaccatttattctagtgctgccttgacctgctttacgtacctttactcttgtgtatttcattctcactcacctcctttcaaatgaataacctgatcataatatttctgtgtattttctttcatattatgagtaatcaggattgttgtatattcttctgtttctaacaataatcgctcgataatagctacgttttttatatctaatgcagacgttccctcatccactacaaaaattcttttcttttgtaacaatgatcgtgcaatcgctaatctctgcttctgacccccggaaatatttttcccattatctccgagcatggcatccaaaccgcctttctccgttaaaaactctcccagattaaccatattaagcacatcttttaactgaacatctgtatatccactatctcccaaagttaaattaaaacgaattgtatcattaaaaatataagcatcctgactaatataggcaatctgttgaaatatagagtctttgttatacgcctctttactgattccatcaaaaagaatttctcccgtataattatcatttatccctatcattgccttaatcatagatgattttccaacgccactttctcctataattgcatacttctttccaatttcaaaacaataattttgatggtccagcacaatatgattgtcgtatttaatctgtaaatttcttacttcaatgctatttttaatttccggacaagttgtccggttgtcttcgggcatattttggggaaatttttcaaatatttttccgctgctttttaaaattaccagattggaaaaaatactattgatcccatttaaaaaacgattactgatatttgcaactgaaaatactgctcctattccaactatttttaaaaatgcaagcaccgcagtgagacaacaagttactccttctaaaattctaaaaattgccacactatacattcccatttttgctgaacgtctgagaagtattttcttttctttttctaaagctatcgagattctattattctgttgaataaattgctctcttcgatgtgctgacacaaaactttgaaatcctgacagtgtatcatggattttctgagaaaatttttcattaatctcagaaatattaagtgtactttctgtaatactcttttcaaaaaatttcggaacaaaatataaaattaccgtactaataatacatgtagctaaaataagcggatgcatatagaataatgccacaatactaaataatactgtactaactgcttcacaaatcaaaaagaaagaagaaaaacacttatcctcaatctggtgaatatcatttgtcagccatgaagcatattcccccggttctttctcttcatatctctggtattccatatgagcgagggaataaattagttttcctttcatctcattgttaaaacattctctcactcctgcttcgtagcgatctgcaaagtatgccatgataacagaaaatactctgattaaaatcatataaacagaaaaccttactgccccttgaatatctgatgctgtcacaatatcatagtaccaggctaatgtatatccggcataaatatcagcaccggctgcggcaataatcagtaaaatcaatattgctgtctttttcttatacttcagtaccagttgcttgagactcatctttcatactccacacttttgcatttgctaatctacataatccatctgccttttctcttatatttccattttcaagataaagaaccccaagacatcttggacagtattttctattctcacatttttgacactcaccaacttgtgattcttctcttacaaactttatccaactctgtctctcttcagatgataaaatttcttttaagctatgttcaaacagatttcccagagacacatttctaaacagttcacaaggatttacctctcctaatggagaaattctaagccttgatattcccgagttacattcacttccagaataagtaaaaattttctgatgaagtaattctacaatcttttcttcacttattctaagttttgtaggtgacaaatctccttgcgtcgttggataaattaacggtgttaaacgatgtctaattcccatattttctagcattttatgtaattctaacaaagaatctacgcattcatttgtaacaacactgcttgccatacagaaatttttctttttttcgtttaatttttgcaatgcatgcaaagacttatcaaatgctccttcaatccctacaaatctgtcatgaaattcttttgtgccatacattgaaattcttatttctgaaatcgggagctgtgtcagcttgtctgctattttttctgtaatcaaagtcccatttgtaagaatggtaactaaaaatttcaaatcgcatgcatattcaataacctctaacgcatgtggatagctaaaaatttctcctcccgtaaaagtaacttctaccacaccagcttctttcagttcatctaatatggactttgctttttctagcgtaaaacgcgtctgtacatgatttatatccgttcctaaataacaatgtctacactttaggttacatccataagtcatttccataaacactttaaatattttattttttctgttaaagtaatcataaacataggcatatgtattatcagatataactgatttcccatcagtttctgtcgtgtctgtttcctcatacttcaaaacttccaacacaagatttacatcttctttgatttcctctattctaactcccatttcctgagagaattctttacagaacttttcaaattcaaattgttcttttggaatcattcttaatctatcaaaaatcaatggacctccgccttccaaaattacaaatggattttcactgtttctgtttataattgcatattcatcatccaattttaatttttcaagcatttcaaacatctttccatctcctcctcatatttttatatttctttcgtatttgttaatttgaattttatcagtaattaagaaaaagttgtatgacatttttggaaagttttaattttccaaaaatgccatacaactcctttctcttcaaagttattataaaaaaaactaagggggtgatatctaatgaaaaaatttcttgtattaatagtgtttcttcttctactaaccatagctgaagactcttctgtttctttttcaacttcttatttaccaaattcctattcaacggatccgggcggtggtgatgaaaaatggcgacctttgattgttgccattttttagtttccaaacatatcatttatacagcttctgcatcgaattccacatatccattctttttaatataatccaccacacaattaaagcgatagtccattttcattaattttaaaaggcgtaatgcatcataaaattcaacaaaatctttttcttttctttctaatacacaagcaataatcgtcacacttcttcccaacgttcttccttgtccggcacttagggctgtctttaatctctttctacaaagttctattggtctagatatatctcctaattcctccaataatcccgccagatttcctaaaactaatccccattctcttatcataaatactggattacatgaacttgcttcataatttatcaaaagtttttctaaaatctgtactgcctgttctttcctattccatttttgatataagcatgcaattaaagttaagatatttttttcatttgctgttagattatatgtaaaaatctcttttgcatatcccgttttttctaaaatagaaattagactttgtataccatcaacaaatgtcaaatgctggcgtgaaatttctatccttaccttttctgtttctaaatactgacaattctcaagataattcgactctaatcgctttgataaatctttcaaaatcccctctgctttctcatattgaaatcgatgtaaagctttttccatctcagcttccaacaaaatcatttcataatctgccgttgtaatatatgcttcaattcttccccttttccgattcattttctctatcaatttttcaaatgttttatcattcggcttacattttcctctctcaattcttgataactcctcccatgtacaaattccatcacacaattcttccatagtaataccgcaggctaaccgattctgccgtatcatttcatagtccagtttaaatcttctattgatatcagaaaataaacgatagttttcaaaatgcataccatattccaattccaaatgtactaatgcatctcgcattctcaaaagttctcccgcctttttgtgatcctcatgtctctcattcttagcgtaaatttccgcacatgcttctaatacctctggaagatataaaatttttccttcttctctcaataattccaatgccttctcaagagcagctatacaataagtctttaactctgatccatcgccatactcatttagtaaaagcactgcatatggataaacttttgcaagctcctcgggttcaaattgtctgtgctcaatatactcaacaattttccataattctgccaatgtggctttttctttgctttctgcctttttcaatacttcccatcgaaataaaaacagcctaatctcctctgcacttaatacttttcccttctcccaaagattcttgaagtctaccgtctgcatgattgcttcttctatatattttaaaaccacccctgattctttttcctgaagccatgcaatctgcgcccgactctgtgcaataaactggcggtgaatctttcctttccccttcttctcattctcatactcaaaaatcagcttttctgtaagatcatattccctgcgacaaatctgcacctgaatctcatattgcagttcatatagatgatataattcagcggaaagaacatactccaaccgtaccgcagattttccaagacgtctgaaaagacgatccagcaaaaatggatctggatttttctgattgttctcaatttttgccaattccgatgccgcacaaactccttccctcaaagccgcttgtgtgattccagattcttttcttaatcttacaagaatttctccgattccctgtttcatataatctctccttcctatcattttctcatctttcatggatgatttatacttattatactgtcttgaatgttctcttccaacagacatttctgtcaactaaaaatctatttattctataaaatcccttcctgtttttaaatacaaaaaaagacatctgcccctgcaaatatcttctctcttttctatctcttctctttttcatataccttcaaaatcacatacagtcaactacttttctaagtttctctcttccatccattctcctatcaccacttggttatgccctcgaccgattagtaacagtcagctccatacattactgcacttccacctctgtcctatctacctcgtcgtcttcaaggggtcttacaactcgcgttgggatatctcatcttgaggggggcttcacgcttagatgccttcagcgtttatcccgtcccggcttggctactctgccatgcacttggcagtgcaacagatacaccagcggccagtccaccccggtcctctcgtactaagggcagctcctctcaaatatcctacgcccacgccggatagggaccgaactgtctcacgacgttctgaacccagctcgcgtaccgctttaatgggcgaacagcccaacccttgggacctacttcagccccaggatgcgatgagccgacatcgaggtgccaaaccactccgtcgatgtgaactcttgggagtgataagcctgttatccccagggtagcttttatccgttgagcgatggcaatcccactttataccaccggatcactaagtcctactttcgtacctgctccacccgtcggtgtcgcagtcaagctcccttctgcctttgcactctttgaatggtttccgaccattctgagggaacctttgagcgcctccgataccctttcggaggcgaccgccccagtcaaactccccacctgacattgtcccccagccgggtcacggctgctggttagaaacccagtactgcaagggtggtatcccaacagcgactctgtatctactggcgtaaatacttctcagtctcccacctatcctgtacatgcaataccgaatcccagtatcaagctggagtaaagctccatggggtctttccgtcctggcgcaggtaaccagcatcttcactggtatttcaatttcaccgggtgcattgtcgagacagtgcccaaatcattacgcctttcgtgcgggtcggaacttacccgacaaggaatttcgctaccttaggaccgttatagttacggccgccgtttactggggcttaagttcaaagcttcgcttacgctaacctctccccttaaccttccagcaccgggcaggcgtcagcccatatacttcacctttcggttttgcatagacctgtgtttttgctaaacagttgcttgggccaattctctgcggccagttctcactggcactccttctcccgaagttacggagtcattttgccgagttccttaacaatgcttctcccgtcggccttaggattctctcctcatccacctgtgtcggtttacggtacgggtatgatataaacaatagcggcttttcttgacgcatggctcacgggcttccctactctcagttcggtccgcatcacgtcttcagattgagaagcggatttgccaactcctctcctacttcgcttgcaccgggctttccattcccggctcccgctctccacacgtgtccccacagttctgttatatcatagtacaggaatttcaacctgttgtccatcgactacgtctttcgacctcgccttaggccccgacttacccagagcagatcagctttactctggaaaccttagatattcggccggaaggattcccaccttcctctcgctactcattccggcattctctcttcttaaaagtccactgctccttccggtacagcttcttccctttaagaatgctcctctaccaattgatcagatcaattccacagcttcggtagtgtgtttcagccccggacattttcggcgcaggacctctcgactagtgagctattacgcactctttgaatgtatggctgcttctgagccaacatcctagttgtcttcgaaatcccacatccttttccacttaacacacattttgggaccttagctggtggtctgggctctttccctttcgactatccaacttatctcgtatagtctgactcccatacatcatctacgcggcattcggagtttgatattcttcggtaagctttgacgccccctaggaaattcagtgctctacctccgcaagactcgtatgaggctagccctaaagctatttcgaggagaaccagctatctccgggttcgattggaatttctcccctatccacacctcatccccacccttttcaacggatgtgggttcggtcctccattgccttttacggcaacttcaacctggacatggatagatcacccggtttcgggtctactctgactgacttcacgccctattcagacttggtttcccttcggctccagaccttcagtccttaacctcgccagccagcgtaactcgccggaccgttctacaaaaagtacgcggttcatcatataaagatgttccacagcttgtaaacatatggtttcaggttctctttcactcccctcccggggtccttttcacctttccttcacagtactatgcgctatcggtcactaaggagtatttagccttacggggtggtccccgctcattcccacaaggtttctcgtgtctcgtggtactctggatcctgccgtgctcgctcgcctttcatgtacggggctttcaccctctctggctggctttcccaaaaccattctactaggcttactcatcacttacgcagtccgaaccccggaatgcacgcatcccggtttgggctcttccgctttcgctcgccgctactcacagaatcgatgtttctttctcttcctccggctacttagatgtttcagttcaccgggttcccttcttaacgttatgtattggcgttaagatgacggaggtttgctccgccgggtttccccattcagatatctccggatcattggatatttgctcctccccgaagcttttcgcagcttatcacgtctttcatcggctcttagtgccaaggcatccaccatacgctctttctagcataaccaacttgcttcgtccacgggtatggactccgctacacatatctagcgtgatatgcgttggcaatagtttgttgtttttattcgttttctcgaatcagttctcatttctgctcttgcaagcttccatgatcacctcggatgtcttgatatttttcttatcatttcatttctgtatgcgattttcaaggtacatattgactgttttatcagtcattagaaacttaaatctttttcattcaaatctctaatcactggtaaatccagttgatgtttcttcctgcttttactctgctgtttgctttttattctttatttaactttatcttgaacagcacttccctgctggtcgggttgacttcgactctctttttcctgccatccagtgccatatattcccatctctgttctctatatctctatacgtaaacttcaataccttttgtatctctctattttcgtatatggcttataacagttcttctgtctccgtctgtatctatataaaaaagcttttcgcttattttcttatagatctggcagccacctgctctcccacaccgtctccagtgcagtaccatcggccgctgaggtcttaaccatcgtgttcgggatgggtacgggtgtttcccctcagcgcatcgccaccagaagcttttcgttcttttcagaacactcataactaaacaatagacttcttcaatccttacttctttcttccttagaaaggaggtgatccagccgcaccttccgatacggctaccttgttacgacttcaccccagttatcggtcccaccttcggcagctccctccttgcggttgggtcactgacttcgggcgttactgactcccatggtgtgacgggcggtgtgtacaagacccgggaacgtattcaccgcgacattctgattcgcgattactagcgattccagcttcatgtagtcgagttgcagactacaatccgaactgagacgttatttttgggatttgctcggcctcacgactctgcttccctttgtttacgccattgtagcacgtgtgtagccctgctcataaggggcatgatgatttgacgtcatccccaccttcctccaggttatccctggcagtctctccagagtgcccggccttgccgctggctactgaagataggggttgcgctcgttgcgggacttaacccaacatctcacgacacgagctgacgacaaccatgcaccacctgtctcctctgtcccgaaggaaagctccgattaaagagcggtcagagggatgtcaagagcaggtaaggttcttcgcgttgcttcgaattaaaccacatgctccaccgcttgtgcgggtccccgtcaattcctttgagtttcattcttgcgaacgtactccccaggtggactacttattgcgttggctgcggcaccgaagagctttgctccccgacacctagtagtcatcgtttacggcgtggactaccagggtatctaatcctgtttgctccccacgctttcgagcctcaacgtcagtcatcgtccagcaagccgccttcgccactggtgttcctcctaatatctacgcatttcaccgctacactaggaattccgcttgcctctccgacactctagctgcacagtttccaaagcagtcccggggttgagccccgggctttcacttcagacttgtactgccgtctacgctccctttacacccagtaaatccggataacgcttgccccctacgtattaccgcggctgctggcacgtagttagccggggcttcttagtcaggtaccgtcattttcttccctgctgatagaagtttacataccgaaatacttcatccttcacgcggcgtcgctgcatcagggtttcccccattgtgcaatattccccactgctgcctcccgtaggagtttgggccgtgtctcagtcccaatgtggccgttcaccctctcaggccggctactgatcgtcgccttggtgggccattaccccaccaactagctaatcagacgcgggtccatctcataccaccggagtttttcacactcgatcatgcgatcacgtgtgcttatgcggtattagcagtcatttctaactgttatccccctgtatgaggcaggttacccacgcgttactcacccgtccgccactcagtcacttgagcttccttccgaagaattccattcaagcgcttcgttcgacttgcatgtgttaagcacgccgccagcgttcatcctgagccaggatcaaactctcgttaaaagtgtttgtttccagtcaagaatcactactagcaatcctatcccttttactgtttttaggttgacatttctgtctgttctgaaattttctcaattgttcgaaattttcagggttgtgttgtctattgtttaattatcaatgttctgtttgttttgctctcttgcgacagctatattagattatcacatctttttatctttgtcaacaacttttttcatcttttttcaaatcttttcttttgtactttcgtaactttctctgattcggtatttttcgacgttttccgttgtttctcatctgtctgctctctcgagcgctcagttatcataccattcttcgacacgaattgtcaatagtttttttattttttattttatttgtacaattcatacaattttcgcaactgcttttgacgcttctccgtgattttccattgttttctctatcttctctcatcattgatcggtacgaaacattatcgtggccacactgtgaaagcagacaacatagttcttctattgctgttgcttatgacaaatgaatatatttgttaagtaaacacttttgtaattgtccgcttccacatttgtaaaaatagaatcaaatatatttttcgaacagtccatgtctgttacaatagccatataaaaatccatgtcccttttttcgaaatcgtacagaaatatcctgctcgggatataattttactatttctacagaccccgatgtaacataggcaataaaagacacataatgccctttactcatcgaatgtttcatcacaatagaaaattcattgtcaacagtttctacaaaaagtgaatgctcttcctcagcggtttctgcttcctgctttagaagtgttattccacaacaagaaaaattcccttcgcctacagctgttataatgttcccacaaatcgggcatacatagaattgtattctttttatatttccggatacattttcatttgtcttcagatctccggtaaataattctgtcagtgatacatgaagtgcttttgccaactcttctactatactgatatccggcaagcctttttctgtttcccactttgaaattgttttatcgctcacattcagtttttctgccaattccttttgcgtgattccgtgtttgatccttaacgttcttatcgtatttcctgttacataactcatagtaatctcccttcacctataagtttattgtatcagtaaaatctttttttacaatctacgctaagtagaatacctttttcatgagcccttcaatgattctcccctcatttattgcagcaacttctgtcaacaatattttgattttctcagattaatccgcatttttcagctgctcgatcatgcttttctttccctggaaatgatacgcagcctttggaacaagccatccaagcaccagtaaaaacggaaaagtcacaagcattggccagattacaaactgatatttcataaaccagatctgtgaggtcagtacccgcaatattgtcacggacatcaacataccgatgagtaatgaagatatcattgtaaatcctgcgtaataaatcccttccaatgtcagcatctttataatctgttttttcgtcattccgattgattctaacattgccagctcacggagccttgtgacgatactcgtcagaatggcattgataaaattcaggataccgatcacggcaactacaaatgtcaaaaaacatccaatgattgtaaacatccctttcaaactttcaaactcgttggaccattttaattttgactcgtagttcatcgtaggttctgtcttttccgaataatttttgacgaattgttgaatcgcttcttctcggtcgtctctcacatcaaatgaatagctcatcagatagtcttccgataagtccttccgaaatacttccgctgttgtataatatggaaatatcacagaataacgcgtagataacccataataattttctttgatcacggagaggatttctacttccctctcttcgccatttggaaaactcagagtaactttgtcgcccgcatgatgtaccatatcctcttttcttaccattccattatcatctgtcgacactgcatagagcagatagttccctgttgccagcttttccttgatcacatcaagatctttctccccttcataaacttccattttttcaaatagaaaatcatctaccccataatacattgtctgatagttttcttcattcaattttgttaccggaattttttctccattccacatccaacagagttccccgttttcatttacaggcatatttttcggaattttataatcagaaatctttactccgacctgatctgttgccgcatagatccgtccacctttttcaaatccttcctgttcttcacacgcttctataaagctttccgttaaatttgattcctgaagctcttctttccttgcagaatactctgaattaaagtattttgcattggcgatcacaaaatcggaactgacaaagttcgccagatacttgtccatatcaaatgcatttgtaaaagtaaaaatactgtttaataatacgattgcaagcgacaacgacacgattacaataacggtctttcctttatttcttcctaaattagaaaatgccatccgactgattttcccgccgtctgccgtttttttctgtttcttcgcctgcctttttccttctgtgtagcgcacagcctccaccggggaaacttttgccgccaatttcgccggtttccctgccgaaatgaatactgtgacaagtgcaaacacggttgccccaacaaaaatccacggattcatagatactgctggatcactgttccccgctatcgtatgtgataaaagcattggcacgatcgcctttcctacaaaaaatccaacaaaaagtccacacggaattccgatggtggaaagtaacaatgcctgccttcggataatctttttaatctgctttccagtcgttccgatcgtctttaaaagcccgtagaaccgtatatctttcataacagaaatctgaaaaatgttataaataatcagatagcctgtcaaaacaatcaaaaatccaacacctgcaatcgcagcaactgtcatagggtctcccgaagtactctcagaaatatatgcccagtttgcgttgcttgcaatatagtttttttctccctctttcgtggagtatccactttccctggctaccttatccagtttcttctgtatcccttgggaattttgaaaaacaatctccattcggattgcgcctaccggagaagtatcctgatcataggtgtactgcaattcctcctgatgttctgccagatatgctttggatacaacagtaaatcccacatcaagagccggatcggatctgatcactccggaaatgcggaaggtgcgctccaccggcgcctgtccttcccggattttcagaagtagtgtaatctgctgcccggcttttactttcatcccaagtagctttaacgatgtttcatcgaccagtacttcctccgccttctccggcgcttttccatcaatgatctcaatgaaatggtgtccataaaagttcttcggataataccatatttccatatgtcgctttaaaaattctggattctccaccgtattcgccacgagtctgttatccgcactttctttgaccagtggatgtctgctcagcttttcatactgctcctccgtaatatttttgaatactccatgagaatcaccacctgcctgacgcatggtctgccgctgaaaattctctgcggttccgattcccactgtaaataatgtggtaaacaacattgcagtcagtgcaatagcgataatggcaatgacattccttgtccggtttgcccggaaacttttatacgagatcttatcaataacctttttgttacgcaccttacgcatagaattcaccgccctttctgcgcgcatttcttcccttgatctttccatcctcgatacgtacgatccggtctgccatctgggcaatctcctcgttatgtgtgatcatcacaactgtttgtccgaaccggtcgcttgtcactttgagaagacttaacacatcctgacttgtagctgagtcaagatttcccgttggctcgtcggcgaggatgatcgcaggcttactggcaagcgcccgggcaatggctaccctctgctgctgtccaccggataactgagacggaagattataccttttcttatccagtcccagtacatggatcacatcctccacaaagtcttcatcgacttcatttccatccagctcgatcggaaggacgatattttcatagacgtttagcaccggaacaaggttgtagctctgaaatacaaatccaatctttcttcttcgaaaaattgtcagttcttctggtttcagtgtagaaatatttcttccatctacaatgacctgaccggctgtcggcacatctaaacctccgagcatatgaagcaatgttgactttccacttcccgacgttcctacgatcgatacaaattctccctgtgctaccgccagatccacaccgtccaatgccttcacaagggtatctccgcttccataatattttttcaactcttttgcctctaaaattgtcataccaacaactcctttctattcacacagtttcttttcatccctaagcattttttgttctttctatataagaaaaagaccttatagaatcagaacccgccccttttttcgtcatgcggttcctttctataaagtcattttataaaatcattcttacgagaatctttccaaaatctaacagttttgacagatttactctttctgaagaaatattttaaaaatacttccgtttccttctttggattctactttgatatagccaccctcgcgctgaacgatttccctggccagatacagtccgatcccgatgccctcttcctgctgcaccaggtctgaccggtaaaagcggctgaaaatctgtgcccgctcctcttcccggattccgattccctgatccttgaccgcaatacagaaatacatctcatatgatatcccttccacctctatccggcttcctttcggtgaatattttactgcattatccaaaatattatagagcgcttcctgcgtccacttctgatcaaagttcgctttgccttctatatcaccacagatttctatctggatctccttctgccttgcccttggcagaatctcctctgtcgcttgacgcacaaggcttcctacccgctgtactgatggacagattttaaaaacatccgacttcagccgcgacattttcacaagtgccgtcgtgagaaattccagttttttcgcatacgtttcaatctgttctgccagatatttctcctgctctccttcggtctgctcttgtaaaagttccgaatacagcatgatatttgcaagtggtgtcttcatctgatgagaaatgtccgaaatcattgactgaatattttcccgctctgcttttgtccgttccatcgacataccggacatcgtaaaatactgtttccactttgactccagccgcgacaattctgtctcatcatatgtctcctccgtaaatgttccgttgattgctttagtcagcatctcatccagtctctgaagtgtccttgttgtccgaaagattcgcacactgtttccccctttcccttctaccttttctttttgtttcttctatctttttatctctcccacacataaccaagtccgtataccgtttggatcggatttttctttcccgtctgttccagcttttttcgcagccttccgacagtcaccgaaagtgcattctcctctacatactgcgctccgtcactccagattcgatccaccagttgctctctggtcaatgtctgcccctgatgctcaatcaaaatccgcagaagcttctgctctgtcttactcagcgtaacttcctgaccttctactgtaaaatacatttgttcaaatacaaaccgatatccgtccttttcataagtaagacctttgtcctgtgccatccgtgcaagcatccgttccacccgcgcccgcaggatcatcagactgaagggcttcgtaatataatcatctgccccgagagaaaatccggtcacctgatcgatttccaaatcatttgccgtcagcataataaccggaacttccgactctctccggatctcctcaagaaaggtatatccactcccatccggaagattgatatccagaatgataagagatactctctcctctttccagattcttcttgcttctttaagattgtacgctgaataaaatcgatactccggcgcgtgcagggcaagtgtgatcccttggtttaagcctctgtcatcttccacaattaaaatcttcttctctgccataccggctccctccttttccgatttctccatgttttctgcttttttctcattcaattcctttggatgaaatgcacaaaactttttctctgacctctattatatcgaatttctcctcgcaaaaacaagtttttcttatcactcttctacatttgctcaagcaaatcgtttttataatattcattatttgcgaataaaaatacattttattctcatctattagcgctaatttttaatgtctattagccttgatttttaataggtttttttcttattttttgtgaaattttttctaaaaaattgtaaaaaaaacattttcatcttccatcagttgtgatacagtaaagaagttcagtaagataacactcattaattacagaaggagatttgtacaatgaagaaaatttatgaaggaaaaaccaaagatgtattcagccttgagaacggaaatgtaatgctcaaattcaaagatgactgtactggaaaagacggagtttttgatccgggcgaaaatagtgttggattaacaatcgaaggtattggcaaagcaaatcttgaaacatctgttcactattttgaactgttaaaagatgcaggcatcaagacacactatgtaggtgctgatgtggaaaatgctacaatggaagtgctccctgcgacagtgtttggacacggattagaagtaatctgtcgtttagttgcaacaggaagtttcatccgcagatatggagaatatatcgaagacggaacagttcttgacggtggttatgtagagtgtacattcaaaaacgatgctttaggtgatccgcttgtgactggagaaggtcttgcagcactcggaatcatgacaccggaaatgttcgaaagcatgaaagagcagacattaaagatcacaaagatcgttgctgatgatttaaaatctatcggacttgacctctgggatatcaaatttgagttcggttacaacaacgacgaagtaatcctgatcgatgagatcgcttccggaaacatgcgtgtttacaaagatggaaagattgtagagccagtagaactgacaaaactgatcttaaatagataatactgaaaaggaactgcctgcagatttgatcaagacaattgaccaaacaccttctgcaaagcagttccttttttatccattcttattttcaacggagcagccaaatacggctgctccttctcttcccttattccttagactgatacaatccccacagatataaaatcggcaaaatgaaatcgataatggaaaatacctgaaatcctaccaacattatggactggataaatgcaatcacaacgattacaaggtagatgatcatgccgatcacacataccttaaaggattttccattcaatccaaagattccgcatacaagcatcaacagggaagaaaataatccttgaagcaacgtcaacggagttgccattgcttttactgcactcatatctactccatttacaacatctcccatagactgcagcataaaataacttcctacggtaccaattgcccccatcacagcaagtacgataaagataattgatacaactttcaataatttgtttggtttaaacatagatctctcctcctttttcttttactcttctggcaaatttcattatgccacaatgattcccttctgacaaatacattttcttctgttacacttttagagctgtcgcagtgcatcgatcggactcatcttcgccgcctttctcgccggataaatgccaaagacaattccaaccccacacgagaaacaggtcgtcaaaacgattgctgtcggagacagtctcgcagataatccaccaatctccagtaccgagattagtccagacagccctgccccgatcaaaattccgatgactccaccaattccagaaatgatcgcagactcacacaaaaactgtacgataatggatgatgtcttcgctcccagcgcctttcggattccaatctctcttgtccgctctgtcactgatacaagcatgatgttcatgacaccaattcctccgacaacaagggaaattcctgctacaaatgctacaaaggctgtcaccatgtcaagcacgcttcccatcgcttccgccatgttcatctcctgctgtttgacaaagagctcctcgccctctcccaaatgccttgcagacaatgtctgaatagcagattttgtagctgcatttgcctggtctccaccatttaaatagattgtcaggctggaaaaatcctctatctggcttccccagttttctgctgttgtatacggcatctcaagaaataccggcatctccataccgaacatcttcatagcttcgtcattcgccttcatcaattcctcatcagaatcccggactccaactatctggatggtctgcagcacaccttcgatcgtcgcctctaactccattccgatgacatccggtgtcccaaacaaatacaatgcacttgctttgtcaataacgcagacagaatctgcattgagcacattgtcttcggtaaaataatttcctcggatgatcgaagtctgcattggattcttctcctcatccggcattgtcagtgtaactgacgcatcaaactctccttttctcgtcgtgactgtccccatcgttgcgccggaagacactactccgattgccttatttccaagattatcctttaccgccttcagatcgtcccaggtaataatattcgtgtagcttgtagcatctttattaacaatcacagagacactttttgtctcgtcggtcgccatcacatctgcctttaatccgcttccgattgacacaattgtgatcacagaagaaattccgataatgattccgagcatcgtgaggaaagaacgccctttgttggacttgatactgtacaatgccatcttaatgtattccaataattgtgccatcgcgtacctacctttctatttctcctctgacttcgccacagttgtcgttgttactttcatcccctcttccaccgttccaaaagtatctgcaacaactttgtctccttctttcagacctgacttgatctccaccttgctgttggatgtaattccaagttccactgcctttttcttcacaacaccactttgtactacatagacaaaatctccttcggtcgaagtatttacattttcattcggaaggtaaaggacatccttttcctctgccactgtcattgtcaactttgccgcaaccccgatatagatattctcgtctggattctgaatctttacatttgcaccaatcaccgggttcccttttgtatttggaactgcaatcttatcgatagattctacaactccatcgtatttatactttccgatttttacaaccgccttgcttccaacttctactttgtcaaaatcacttgcaggaatttccagctttacattgacatcctgattgctcacaagtgtaaataactctcctcctgcgacagcagtgccgccctccatcgtctttacatcagagatcacaccatcaaaatctgccttgattccatctcttgcctttgccatcagttcctcagagctgagcactgccagttctgccagattctccgtgattgccatattgttgatctgtccctgtgtgagactcgtatccggaatgcttgcactcggtgtttctacagaaatacttgcacgaagctgctctgcctgtgcctgtaatgcctgtacttcctgctgtatctgcgcatatgcttgctggcttccggtctgtatctgggcactgacctgggcaatctgggcatcgagcgctgcgtttgccccttctttttctgcaatctcttttgatctctcagtaatctcggtctccagttgtgccttctcttcatcacttacatttcctgtattaatcttttcccggcggctgttgacttccccatacaatacagaaatccgctccaaattcacagccttctgtgcattccattcgtccaactgcggctgaagagtctggttcgcagtaatttcatcttgcacactctgctccagcgatgccatctgccgtgatttcgctgaaatctgtgattctacactggcgatctgctgttctgcctgtgcacgggctgcaccagctgccgcctgtgcatcggccgctgccttcgctgcctcagaagcacttcgatctgcctgctcccttgcgctttgatttgtattgactgcagactgaagatccatctgtgctttctgattgttcttttccaggtcagacgtatcaaatgccacaaggagatctcctgctttcactgcctgcccgactttcgcacgaagctggctgaccggcgcattgaccggggaataaaatacctttttcttctcgctgtccactgttccggatacattgtagatttctttcacatctcctcgtaccacttcgacaacttccacagttcctcctgtctttttctcttttgaagtaaattgggacgcaatcactgcgacaacaacaattcccccgataactggaacaatcacccagttcggaagcttcttctttttcttacggacatctgtagtttctttgcttccttcctcttcctccgacggaacgatcatgtctgtctcttcataaatctctttgtctttctttctcacgactattctccttgcttctcttcgtttaaataatcctgctcaattcttccatctcgtatgtagattactcgctttacctgctccgcaatttcattatcatgcgtgatgataatgactgttcttcctgatttgtgaagcccttctaaaatctgcatgatctcttttgtagattttgaatccagatttccggtaggttcatctgccagtatcaccggagggcttgccgcgatcgctctcgccactgcgacacgttgttgctgacctcctgacatctctgacggtttgtgtgtcatccgcttctcgagacctactttgatcagtgcctgctttgccgcggctcttcgcgtctttctgtcaatcccccggtagatcaacggcagctccacattgccaatcgcatctagatttgcaatcagattaaacccctgaaagataaatccaatctcctgatttctcacatcggacagttcattatccgtcattctcgaaacatcctttccatgcaaaaagtaacttcccgaagtcggtgtatccagacaaccgatcatattcatcaatgtggattttccagagccggaatgaccaatgatcgcaacaaactctccctcatggatctccaggctgacaccatctagcgcacgcacttcgttttcacccggattgtatatcttatgcatatctttaattgatatcaatggttccaccttgccacccccatattgctattctgtgatatctaaatgtacctttgtactacttaaataatacaattagtatagcacttttttccataattgcaatcattttttttagaattccaaaatgcaaaaagagatgaaagaatacatctctgtatttcttccatctctttgtattgatttgtcttatgactttttattttatgctctgaaataatcctggatcttatactaactcaaggagaacttccattgcagcatcacctttacgaagaccaatcttaacgattcttgtgtatccacctttacgatcttcgtattttggtgcgatttcgctgaataatttttcaactaaatctacttcttttgtatttttctttcttccagcagctttttccggaacttctgtcactgggtagagaacttttaacatttctcttcttgcatgaagtcttgaaggcatatcttttttgattgtcttttctacttcatcgtaaactgtaactttctttccgtctacaacttctttcactctcttgccgtctttatctttacgtgcaacttttgcttttacagttacttcttcgtaattgtctttttcttttactgctaaagcgataagaccttctgcaactttgcggatttcttttgcttttgcttctgttgtaacgatcttaccattgtgaagtaatgctgttacctggtttctgattaatgcttttctctggctgcttgttctgccaagttttctatattttgccatttttaatttcctccatatttcggaacacacggctatgcacttcgggcttattaaccggtgtcatctagttatgcatcttcgggcttactagctagatgctgttatcatttactcttctcccgggcttaattctaatccgagttcttttaattttgcaagaacttcctctaatgatttccgtccgaggttacgaactttcatcatatcttccggagttctgtttgtcagttcttccactgtattgatgccggctctctttaagcagttgtaagaacgaacagaaagctctaattcatcaatgctcatctctaacactttttctttttcatcgtcttctttttcgatcataacttctgcagcctgagctacttctgaaagatcgatgaataatttcaagtgttcgttgagaaccttagcagcaaggctgactgcctcatctggaagtaatgttccatttgtatatacatccagtgtcagtttatcatagtctgtgatctgtccaacacgagtattctctactgtcagatttacacgttctaccggtgtgtagatagaatcaatcggaatcacgccgatcggcagttcttcgttcttgttcttatctgcactgatataacctctgccttttgtgatagtaagttccatgtaaagtttgctgtctgcaccgccatttaatgtagcgatcactgcatccggattcatgatctcgatatctggatccacctgaatatcagcagcagtcacgacaccttcgccctcgaactcaatataagcagtcttcggctcatctgtctcggaactgttcttgattgccagtgatttcagattcatgatgatctctgtcacatcttccttcacgcccggaattgaactgaactcatgtaacacaccgtcaatctttacgtggctgattgcagctcccggtaaagaagaaagcatgattcttctcagagagttaccaagtgttgtaccatatcctctttctaaaggttctacaacaaatctgccatattttttgtcttctgaaatctcagtaatttcaatatttggtttattaaaatcaaacacgataaagtccctccttctgggctattaaactattgagggtaactatactccaaataaacttcccacagcatatctatatgccgtacacattttcacacgatactctgtctgaatccgcattccgacaaataatatgtgataggatacaactaggggttctcacaaaatgaagcattcagccaagatattgccaaccgccgatagacgaagacgatctcctgtagaaattttccattttgcaacacccctgtctgttgcagcgtaatcaaacgcaaaaggtttaattatttagaatataattcgacgatcaacatctcatctactggaacgtcgattgcttctcttaatggaagttcttttacagttccttttaagttttcagcgtctgcttctaaccaatctggtaccattcttccgccagtcacttctaagatgtctttgtatctctgagaacctttattcttttctttaatttcgataacatctcctgcttttactaagtaagaaggaatgtttacctgttttccatttactaatacatgcttatggtcaacaatctgtctagcttcttttcttgttcttgctaaacctaaacggaatacaacgttgtctaatcttgattcaaggagaatcataaggttatcacctgtcattccgttcattttctgagcctttgcaaaatagtttctgaaaggtttttctaaaacgccatagataaattttgctttttgtttttcgcgtaattgaagtccgtattcgctcatttttctattagctctttttaattgtctgttagattttttatcaattcctaaatagattgggtccatacctaatgaacggcatcttttcagaactggaactctatttactgccattttcgtatcctcctaattacactcttctacgttttggtgggcgacatccgttatgtggaactggtgttacgtccttgatgcttgttacatcgattccgcatgcctgaagcgcacggattgctgcttctctaccagaacctggtccttttaccataacgtctactgatttcaaaccatgtactaatgctgcttttgctgctgtctcagctgccatctgtgctgcataaggagtagatttccttgaacctctaaatcccagaccacctgcacttgcccatgaaagagcatttccctgagcatctgttaatgttacgattgtattattaaaagatgattggatatgtgcctgtccgcgttcaacgtttttcttgacacgtttctttgtcactttttttgtaactttcttagccatttaaactaacctactttctacgaattcttattatttcttcttgtttgctactgttctcttaggaccttttcttgttctggcatttgtctttgtcttctgaccacgtaccggaagtcctcttctgtgacggattcctctatagcatccgatttcctgtaatctcttgatgttaagagcgatctctcttctaagatcaccttctactaactgagtttcatcgattacagcactgattttctttacttcttcgtcagttaaatctctgacacgagtatcaggatttactcctgcctcttctaagatacgattagagcttactctaccaattccgtagatgtaagttaatccgatttctacacgtttgtctcttggtaagtctacaccagcaatacgagccatgtgattttcctccattttgaatcttggtcagcaagaagtatgcatagcccctgggttacaggtctgaaatgtagtatacaccctcttctgccgtagtttatattgtctcaaattgggacgccgggatcttcatccttcttcactgcgtccagccacagtttcctgtgacctttctggccggagccagtattataagcaatatacaatcggtatgttcttgtatattttaataacaccacacaccctggtgtgtcatgttacagccgcctaaataaatctttgtgctttacgcacaaattcgacaacgacgcttattatccttgtctttgtttgtgtttcggattttcacagattactctgatgcttccttttcttttaatgattttgcatttttcgcaaattggtttaactgatgatctaaccttcacgtcaaatcctcctttcatccactgctctgcctatatttacccactattctgcaaaataatcacaaaacagttcgcctaatattatagcattataattttaataaagtcaatagttttttacttatctctccaaataattctaccttttgacaaatcatacggtgataactctaaggttactttatctcccggaagaattttgataaaattcatacgcagctttccgctgatatgtgcaagtacctgatgtccattttctaattctacctgaaacatcgcatttggtaacttctctactactgttccttcaatttcaatcacgtcagcttttgacattttttacaccctcctaatgattcacgttcttttccttatataatttcagtatccgttttactgccacatcgtctgcggcctgtatctcgtatcgttctgtaatgatctgtacatgcttccttttcttttttttaggtttgtcacatgtacgattctctccatttacaagatacacatcgttttcatccatatctttgatgatataaatctgccctttgtcatgcccggcttttgatcttgcgagcattcctgtttctaattccttcatattctgtcctcttacttcaataaggttaaaagtaccggttcgtcttttgtgatcaacaccgtattttcgtaatgtgcagataaggaaccatctcttgtcacgactgtccagtcatcatctagccagtcgacctcatgcgaaccgatgttgatcatcggttcgatcgccagtgtcattccagcgcgcagtttcggtcctcttcttccctgtgcaaagtttggtatctcaggtgattcatgcaggtgagtaccgattccatgtccgcataattctcttacgacaccatatcctctctcctccgcatatcttccgattgctgctgaaatttcaaataaatgcattccctctcgggcaaatttgattccttcaaagaaagattctcttgtcaccttgatcagatcagctgcttccttgctgatttcgccgaccgcatgtgtccttgcagcatccgaatgatatcctttgtagatcactcctgcatcgagaccgacaatatctccttcttttatgatcctgttcttcgacggaatcccatgtaccacttcgtcattgactgatacacagatggacgccggatatccattataattgagaaatgacggaatgcatccataacttctgatcacttcctcaccgatcttatcaatgtcaagtgtcgtcattcccgggtgcaatgccttctcaagttcctcatgtacggctgcgagaatccttcccgcctctgtcatcagttcgatttctcttgccgatttcattgtaattggcatatgcttacgctcctaaaatctcaacgatcgccgcaaatacagcttccatatccactgttccgtcgacctcttttaatacatgcttctctgtgtagtaatggatcaaaggctgtgtctgctcatggtaaacaccaagacgttttaaaactgtctctggctgatcgtcctctcttaagatcaaatctgcaccacagacatcacatacattctccacctttgtcggtgcatattctacatgataagtggcaccgcagcctacacatgctcttcttcctgacattcgatttacaatgttttcatctggtacttctacattgatcgcatagtccactttctgtccaagtgcttccaatgcacggtcaagcgcttctgcctgcggaattgttctcgggaatccatcaagtacatatccatttttgcagtcttcctgattcactcgatccacaaccagatttactacaagttcatccggaacaagaagtccctgatccatatatgtctttgcctgttttcccagttctgtcccgtttttaatattcgctctgaaaatatctcctgtggaaatatgtggaatctgatattttgcagcaattttttttgcctgtgttcctttgcctgcccccggcgcacctagcataataattttcatggcattttcctccaaacgcgacgatatgtccgtatagtattttagtgttctgaaaaaattcagaacactaattgattacttatttaaaaaacctttataatttcgtacaagcagctgggattcaatctgtttgatcgtctccagtacaacacctacgataatgatcagagatgttccgccgaaggaaacatttgctccgagccagccattgaatacgaaaggaattacctgtacaatgatcagtcctactgctccgataaagatgatataattcaggatctttgtcagatagtctgctgtcggttttcccggacggatacccggaatgaacccaccgctctttttcatattgtttgcaatctctaacggattaaatgtaatagatgtatagaaatatgcaaagaaaacagtcaggacaatatataagatcagtccccaggaatattttaattgctctggattacaccagttattagaacttaatcctttcagaatctcgcttccgattccctttccgtttccctttcctaagaaagaagcgatcacgaccgggaattgcatcagagaagatgcaaaaataacaggaacaacacctgctgtatttactttcaatgggataaatgaagactgtcctcctacacttcttcttccctggattctctgggaatactgaacagcgatctttctctgtccatcttgaagaataataacaaagacaactactacaagtataattgcaagtataataacagctgcgagtcctgcggaagcaaggctcttgcctttcatgaactgattatacagtgtcacaaagtcatctggtactcttgaaatgatattgatcagaagtacgatggaaataccatttcccacacccttctcattaatccgctcaccgatccacataaggaatgcagaaccggctgtgagtgtcactactactactgcagcatttacaaaattaaaatcaacaagaagtccctgacgtccaaatccaacagccattgctgtagattcaatcagtgcaagagccactgtcacataacgagtaatcgctgcaatcttctttcttccatcttctccatccttctgcatttcctccaattttggaattgcaattgtgagaagctgcataatgatagaagatgtaatgtatggagtgatgctcagtgcgaatactgacatctgtgtgaaagaaccgccagtgaaagcgttaaaaaagttaaacgcttcccctgtctgactttcaaaaaaattctgaatataagttggatcaacacccggtgtcggcaattgtgaacctattcgaatcacaacaagcatcataaatgtatagaaaatcttttttctaatatctgccacttgaaatgctttccgaaatgtttttagcattagatcacctctgcttttccaccgagagcctcaattttagctgcagcgcttgcgctgaaagcatttgcctgaacagtaagtttctttgtaagttcaccgtttccaagaatcttaacaccatctctaggattcttaacgattcctgcttcgattaatgtctcaactgaaacaactgaatcattttcaaatacttctaatgcgctcagattaataccaacgatttctttagagtttctgcatgtgaaacctctctttggtattcttctgtataatggcatctgtccaccttcaaaacctggtcttgtagcgcctgaacgtgctttctgacctttatgtcctttaccagcagttttgccatttcctgacccatgtccgcggcctcttctgaaattatcactatgttttgacccatcagcaggtcttaagcttgataagttcatcgtgacacctccttgtctataattatgcttcttctactttcactaaatgtctaacttgctgaaccattcctcttgttgcagcgttgtccggtaattcaactgttttgttcagtttctttaaacctaaagcttccactgtctttttgtgttttggaacagcaccgattgtagattttactaatgtaacttttaaatttgccatgttcaatctcctccttagcctaaaatctcttcaacagattttccgcgaagtttagctacttcttctggagttttaatctgacttaatccctcgatcgtagcaagtactacgttctgtttgttgttagatcctaaagattttgtacggatatttttgatacctgcaagctcgataaccgcacgtgccggacctccggcgataactccagtaccgtctggagcttttttaagtaatacagaagcacttccgaatttaccaattaaatcgtgtgtaatacttccattctcatctaatgaaacagaaataagtttttttgctgcatcttcttttcctttgcggattgcttccggaatttcagcagcttttcctaaaccagcaccaacatggccatttccatcaccaacaactactaaagctgtgaatctgaagttacgaccacctttaacaacttttgttactcgtttgattgataccactttttctgttagttctaattgactagcatcaatgcgattttgtttcattgtgttcctcctcctagaattctaatccagcttctctagctgcatcagctaatgctttgatttttccctggtatataaatccgcctctgtcaaagacaacagtgttaatacctttttcaattgctctctttgcaatcactgttcctaaatatgctgctgcatcaacgttgttagttttttctaattctgcttttacttctttctgaagagtagatgcagataccagagtctttccaactgtatcgtcaataatttgagcatacatatgattattacttctgaacacagctaaacgtggtctttcagctgtaccgctgaaacggttacgcagtcttctatgtttgtttacgcgaacttcgcttcttgattttttactaaccattttcacactctccttaattattttttaccagtcttaccaactttacgtctgataacttcatcagcatatttaatacctttacctttgtaaggttccggtcttctcttatctctgatttcagctgcgtattggcctactttttctttatcgataccttttacagtaattttgttctgtccgtcaagtactgtttcaacaccttctggatcgatcatttctactgggtgagagtatcctaaacttaatgttaatttgtttcctgattttgcggctttgtaaccaacaccatttacttcaagaactttttcgtatccctgagtaacaccaactaccatgttgttgatgagtgttcttgtaagaccgtgtaacgctttcattctctttaagtcgcttggtcttgttactacgatttcttcgccttcttttttgatttccatctctgttggaagctctcttacaagagttcctttaggacctgttacagtcactttgttgttctcagcgatttccacagttacacctgctggaattgctactggcagtcttccgatacgtgacatacctttacctcctacacttaaattttcggagaagcaatctatgcttctctgttttcagttgcatttgccgattaccaaacgaagcagagtacctctccaccaacattcagttttctagcttctttatcagtaactacaccatgatttgtagaaatgatagctgttccaagtccgcctaatactctaggaagatcttctttgtttgcatatacacgaagacctggcttagagattctcttaagacctgtgataactttttcattcttatctgcaccatattttaatgtgatgcggattgtcttgaagttaccatcttcgattacgtcatattttgcaatgtatccttcgttgaaaaggatttctgcgatagcaagtttcattttagatgccggaacatctactgtatcatgttttgcagtgtttgcattacggattcttgtaagcatatctgcgattggatcactcatagtcatttgaagttgcctcctattttttcattcttcatttacttgttacatccttcagatgcagccggaaaatccgaccgcttctactacggatatcctgtttgctctttctattttgtggcttaccaggaagctttctttactcccgggatctgtcctttgtatgctaattcacggaaacatactctgcagattccgtattttcttaaatatgcatgtggacgaccacagattctacaacgattgtactctctagtagagaatttttgtttacgttgttgtttaattttcatagatgtttttgccatgaaatatttcctccctactattttgtaaatggcatattgaataatttcaataattcgcgagcttcttcgtcagtcttagctgttgtaacaaagataacgtccatacctcttactttatctactttatcgtattcgatttccgggaagattaattgttctttgataccaagagcatagttacctcttccatcaaatgcgttcggatttactcctctgaagtcacgtacacgaggtaatgctaagttgatcagacgatctgcaaactcatacattttttctcctcttaaagtaactttacatccgatagccattccttctcttaatttgaagttcgctacagatttttttgcttttgtgagaactgctttctgtcctgagattttctcaagatcagctactgctgattctaacactttcgcattgtcttttgcttcgccaacacccatgttgataacgatcttatcaagttttggcacttccataatatttttgtatccaaatttcttaatcatagcatctacgatttcgttttggtattgttctttcagtctactcaaagttctggtcctcctttcccgaattagttcttcttatcaacgatcacttcgcctgttgattttgctacacgcacttttttgtctccgtccatcttgaacccgattcttgtaggttttccgttgtggacatacattacgttagaaatatcaataggaccttcttggtgaacgataccgccattctgattagcagcacttggttttgtgtgctttgtcagcatattgataccttcaactaatactgttccgtcttttttgttgacagcaattactttgccttctttatctttatcttttccagcgatcacttttacagtatcaccttttttgattttcatagttgacattccggtacctccttataatacttctggagctaatgaaacaattttcataaactgtttctcacgaagctctctcgctactggtccaaaaatacgagttcctcttgggtttttgtcatctttaataattacagcagcattttcatcaaatctgatataagaaccgtctttacgacgagcaccttttactgtacgtacaactacggctttcactacatcgccttttttaacaacaccacctggtgttgcatctttaacgctggcaacgatcacatcaccaatgctggcatatcttctagtagaaccacctaacacgcggatgcagagtaattctttagcacctgtgttgtctgctactttaagtctactttcttgttgtatcatgccggtaaacctccttcataattctaaagcaaattattttgctttttccataatttctacaagtctccatctcttatcttttgataaaggtcttgtttccataacttttacgatatcgcccattccgcattcgttgttttcatcatgagcttttaatttatatgttctctttacgattttgttgtacagagggtgttttacgtgatcctctactgcaactacgatagttttatccatcttgtcacttacaactttacctgtacgagtttttcttaaatttctttccacagtttctactcctttccgaagttcctgaagctatattctatgaatattactcagcttttgccatttctgtaattacagtctggattctggcaatattttttcttacttctttaattctgcttgtgttgtctaattgatttgttgcgttctggaatcttaagttgaaaagttcctttttagcagctactaattcttcattcaattctgcagctgattttgcctttaaatcttctacaaatttattaattttcactgttatcaccgccttctaattcttcgcgagaaacaatcttacatttacaaggtaacttgtgcattgcaagacgtaatgcttcacgagctacttcttcaggtactcctgaaagttcaaacattacacgtcctggttttacaactgctacccagtattccagagttcctttaccagaacccatacgtgtttcagctggttttgtagttacaggtttgtccgggaatattttgatccaaactttaccaccacgtttgatgtaacgtgtcatagcgatacgggctgcttcgatctgatttgaacggatccagcatggttccattgcaacaataccatattcaccgtttgtgattttatttccacgtaaagcttttcctttcatagaaccacggaattgtttacgacgttttactcttttaggcattaacataattatttatcgctcccttccttagtctcttttgttggaagaacttcgcctttgtagatccatactttaacaccaacttttccataagttgtgtcagcttcagcgaatccatagtcgatgtctgctcttaatgtctgaagcgggattgttccttcgctgtaaaattctgtacgagccatatctgctccacctaaacgtcctgatacggaagtttttacaccaagtgctcctgctttcattgttcttgacatacaagatttcattgcacgtctgaaagaaatacggttctctaactgtaatgcaatgttctcagctactaactgagcatctttgtctggtcttttgatttctttgatatctacaactaatttcttatctgtaaatttagctaattcagcttttactttctcgatctcagctccacctttaccgattactacacctggttttgctgtatagatgatgattttcacgcggtcagatgctctttcgatctcaatcttagaaactcctgcgctatataatttctttttcagaaatgttctgattttatggtcttctactaaataatctgcaaatttgtcttctgcataccatttagagtcccaatctttgataacaccgactcttaagccatgaggattaactttctgtcccatgattgccctccttatctttcattcagcacaagtgtaatgtggctcattctcttctcgattctgtaagctcttccctgtgctctcggtctaattctcttcattgttggtcccttgtttgcataacattcttcaatgtaaaggttctcaacattcataccgttgttgttctcagcatttgcgattgctgattctaataatttctttattaaactagaagcgtatcttggattgtaagttaaaataccaagtgctgtctgtacatccttacctctgatggcatctaatacgaaacatgctttctgaactgaaactctagcgtaagataacttagctgacggtctagtgtctttgtttgcatttctctctcttttgatttgggatctatgtcctttagccatggatgaatcctcctttcataattaagccctccccaagggtactatgtacccaaagggtgttgttttattcatctctattaacgaactcttgatttcttttcgtcttttccatgtcctctgtatgttcttgttgcaacgaactctccgagtttgtgtccaaccatatcttctgttacatatacaggtacatgttttcttccgtcatgaacggcgattgtatgtccaaccatctgtgggaagattgtagagcgacgtgaccatgttttgatcactgatttgtcgcctgcttcattcatagcttttacttttttaagtaagctttcgtccgcgaatggtccttttttaagtgagcgagccataggttctaacctccttgtaaactatttatttgatacctttaccatctcttcttctaacgattaacttgttagaatgtttgtttttctttcttgtcttaagaccaagtgctggtttaccccaaggtgtacatggacctggacgaccaataccagtcttaccttcaccaccaccgtgtggatggtcgttagggttcataacagaaccacgaactgttggtctgatacccatgtgacgtttacgtccggctttaccgatgttcacaaggttgtgatctccgtttcctactacaccgatagatgctctacaaatgatcggaaccattctcatctctccagacggaagtctaagtgtagcgtattttccttctttcgccattaactgagcgctgttaccagctgaacgaactaactgtccacctcttcctggatataactcgatgttgtgaatctgtgtaccaaccggaatttcagaaagtggtaagcagtttcctactcttacttctgcttctggtccgttcataactttcattccatctgttaatccctgaggagctaagatgtaagctttctctccatctgcgtagcagattaaagcgatgttagctgttctgttcggatcgtattcgataccgattacagtagccggaattccgtcttttcttctcttgaaatcaattactctatattttctttttgctccgcctccgcggtgtctaactgtgattttaccctgattgttacgaccagctgttttgcttaaagatacaactaaagatttctccggagttgtctttgtgatctctgagaaatcagagccagtcatatgtcttctggaaggtgtatatgggcggtatgttttaattcccattactgtctctcctttcaattcctaatttttcgtttcacggatttgcaccgtatagttactttatcttataagccttcgaaaatctcgatatcagcgctttcttctgtaagctgaacgattgctttctttgtctttgcagtttttccgtatgtcataccacgtctttttgtttttccatcaagattcatagtatttacgctttttacttttgttcctgcgaacattttttcaactgcttcttttacctgagactttgttgcctgtggatgaactaaaaatgtgtatttcttttcagccatagcagccatactcttctcagtgatcactggtttaaggattacatcataatactgaatgcttgccattatgcgtacacctcctcgatagtctcaacagctgctttcgtagcgattactgtgttatatttcagaatgtcgtatacattgattgtatttgtacgagctgtcttaacagaaggaatgtttcttgcagataattctgcattcttatttccatcttctaaaacaactaacgcttttgctacatttaagttgttcagtacattctggaaattctttgtcttgatctctccaaagttgatctcatcaagaacgatgaatttcttttcttctactctacttgtcagagctgatttcagagcagctctcttctctttcttatttaatttgaaagagtaatctcttggtgttggagcaaatacaactccgccgcctgtccattgtggagctcttgtagaaccttgtcttgcatgacctgttcctttttgtctccatggttttctaccaccgccgcgaacttctgagcgagtttttgctttctgtgttccctgacgtttatttgcaagttggcttacaactgccatgtgtaataagtgttcgtttacttcaacaccgaatactgcatcgcttaagtcgattgttccaacttctttaccttcgatattataaacagatacgtttgccatctgtgtgttcctcctttcctattaaagactagattgcttttacgctttctttaattgtcactaaagatttcttaggtcccggtacagatccctttactaagattaagttgttttcagcatctactcttacgatttcaagattttgaattgtaattctcttgcttcccatgtgtcctggcatcttctttcctttgaataccttgctcggatcagatgcagcaccattggaacctgcatgacgatggaatttagaaccgtgagtcataggtcctctgtgttggttatgtctcttgatcgcaccctggaatcctttacctttagagattgcagtagcatctactttatctccagcagcaaagatatcagctttgatttcctgtgctaattcgaactcgtcagcgttttcaaatttgaattctcttacaaatctcttgcttgaaacaccagctttgtcaaaatgtcctttttctgcttttgttgtaccgtgtctgtgcacgattgttttcttaccgttcttgtctacgttaacgattttgtctttcttgtcaacgaaaccaacctgaacagcgctgtaaccgtcgttctcaactgtcttgatctgtgttactacacatggaccagcctgaagtacagttactggagttaaaactccatcttcgttgaagatttgagtcattccgacttttgtagctaaaatagctttcttcattataattacctcctgtgatttacagcggaacactgaatatatgtgttcatcctaaatataggattgttactgtcttatttgtttttcattttgatatcaatataaacaccagccggcatctctaatcttgataatgcatcaactgttttctgtgttggtgttgtgatatcgatcagtctcttatgagttctctgttcgaactgctctctggaatctttgtatttgtgcaccgctcttaagattgttacaacttccttcttagttggaagtggtaccggtccactcacctgtgctccatttttctttacagtttcgataattttctttgctgatgcatctactaactgatgatcatatgcttttaatgtgattctcattacttgacttgccataaaaaaagtcgcctccttttcgtactattcaacttaagtacgacaagcggtgactgtacactctcccgtgtgtgtcataaaactctcacacgttgttaccgtttttcatcggctgttattgattcgtacagtgacttgtcgccagtttcctaacttgacattcgctccacggaacacctgctatgttaagcagcaacctcacgcttcatcgctatcatgtcacagctctcttagtatacaagatactttttagttttgcaactattttttacatttttttcgatttcttattgtattttttaatgtacaatttttttcttctttcctattgacaattttcgactccggctttatactatcaccgaagttatattagtgatgcagaccaaaggcggtgatcttcaggaggatactgtctttttttcagcctatcttttataactttataccactaactgttgcttttgcaaggatttgaaaaaactgtttcccccaatagacagtttgtgcgaaattcaatccaatatccattccccctcttttaatataacggattgcaaagcaacaaacctctcaataaatatagaagaaagacatgccgcagcttagtcagtcatcttgcaggcatgtcttttttcgtctttttctttatcctcttctcatctttagctttaacatcgccacagcctttctcgcatccagctctgtcacactattttctccaagcacacacgtctctgtaccactcttactcttattaatatctacgattgcattcagattcgggctctccacaacaaaaccgccggaagtcccaacaaatttcaatccagagacagcaattcctctctttgtcaattgctccaccgtattgacataatccacatcactattcccccatccatccgcagaaatgattgccccatctgcccgcatactctccgccaacacggcagctctcgttcctacgagcattttttcttcctgattatcaggagttcctactataataatgcctaacagatcaagttcttcatccgaagatattacatccagaagcggatcccgaaaatgatgcaggcttgtttcttttgtagacggtccgattcccatcgctttttcctccttctttccttactgcatggatcgcaagattccatcccggtattcattcggtgttacgaccagaggcatatttcccatatcaatgatagatctgcctcctgccattcctgatggttcttttgcaaagagctgcatgtcatacattgccccctgaccagccacctgttttacaatcacaaccttctttcttcccggtctctcaatatcatagaactctctccgctctgtacactgttccccgcgcagcttttttaaacactcccggtactgctggacaaattcatcgcagagcgcatgcgcctttgtgaccgcctcacgatcctgccccttgccggcacagaacgtcacctcaaacaaaatcagttcatctccccgcttaggtgttccagatttcccccatgcgatctgctcctcgatcaccccttccgatgatccaaattccgctgtctggattccatctacatccaccccggttaacaatacataagctcctgtcacggtgtgtgtcactccctcaccgatttctcctagcacttttgctgaaatcggaattacatccataatgctatttgtctcctcctgatactgatctggatgcacaagccgaatacgaatctgttcaatcatctcatgatccactttttctgcaaaagattctggtgctacttctatctccctcgcccttgtgatccgattttcttgcccttcccgaacagtttctgcatgaaaagctttaatgacaagacgccgctttctgatttcttccacttttctttcccctttctttcacatctgcttttcccttcacacctattacaaaaagcaattaaaaaaacgtgtatgaattcccattctctttcttcgcatcgttcctttgatactcactctaccagaaatagttctcatacacgttttcttttttcatatgatattacacacaattatactttcgctacatattcaaatggaagcggaacaatctttccaggagtttcaatctctatgagctgctccaatgtcgcttttacgattgcagtctgcatctctacatcgttcggcgctcccgcatttgctcccatcggaacaagcggcgctaccgcacgaggggttccagcctgacgtacaaccggcggaagtgccgcaataataattgtcggaattcccgcttcctcaatcgctctctgcaccagtactgcagagcggtggcaggtacctcaaccggcagtgaggatcactgcatctacaccttcctctttaaacatctgagcgatcgcaggtcctgtctcatgtttaaacttctcctgatttccgccgcctcccataaatccggcatgcactggcgcgcacgctttgataaatccttccttcgccagttcatggatccggtcaatcggaaacatacagttgatgtctttattgacatccccattgtcatatccaccgtgggataccatcaattcatcggatttcatctgatctgtgatttttctccaagtaaaatcacccgcaagattaaatctctcatcgcttttatggtgaacacccgccgctgttgccagcgcgatcgtcatatctttcaactctttcttcaccggagtccatacagccggcggtgtgatcggaacaaagatttccgactgcatacctttcactactgttaagctcattgcgttacctcctcatcgtctctattgttcgcacgcattttttcctgacgcttctgatacgtcatcagattgctcatatatttttcattgatctcagggcccatctgttccacaaaactcatgttccatacaacttcctgtcccaccttcaccggatagtctgtgatcaacatccgcatcggtactttcagatagccgagacgacctttcaaatcaatccccacacagccatcatgtacctccacgatcaccccttccatccgaatgatcttatccccatacttcatgtcatcacctgctatcgactttccgacagtttctggctgccgcaaaattttagtcgtatttttcttttcgcttctggctcattggcagagactgttcatttgccacaagttctaccggtttcccagtcacattagagatcagctccacgttattttccttcacatttggattccattttttctccggcttcttgatctcttctcccgccatatctgctttcagcatataaagcgcacgaattgcatcttcatgacagagtgtattgcatgcgagcacttcattctcgattccggattccgatttattgttatcaaccatattggtcatatatttatttccgacaacaagcgctccctgcactgcacagaacgacatcccaactacagaaattcctctcataccaatctgttcaatgtggcttgcaaaatcgatgtgattgtttccaaacccttcggttgtgacaaatgctccgtctacgtccagagcttcgcacatcattccgacacgctttgacacgtagaatttctccgaattgatctgaggacttcctacaaaaataacgccgcagagatccagttctttgtcatacaaggtttccagtacaagaggttctctccagtaatgtcttgacatttcctttgatgcaggtccaatgcatgtcagcgcatgaatacatccgtcaagtacctcaagcggagataccataaccggaacatttccaaggtctacatttggttttgctccaaggacaccaaccggctctaccggaagaatcagattgtcatgcatcgctccctgtcccataatttcttttacgatcacaacttttttcttaccaggtcttctcacctgttcaaatgtttctgtatcaacaacaagtgtatcatccagtttcttcagggcaaggcggatctcctgtgtgatcacatccgttgcagtgtgggccgcaagcggtcccggacgttccatattcgtaccttctttgatgaccacttctgtcttaatgaagatttcacctttctccggcgctcctggtcttccccacataatattttcatccaaaattccttcagaagatccaaactctccaatctgaacaccatttgcatcggtacctgtcaccataacaacaacgccgtcaagcactcttgttgtaccggatccaatctcatcttccccttctttggctgcgatcggctgtacatccataatcgtctcagagtatgtatgatactgttccggtgtgatgatatcaatcttcagactattgacaagttcctgggaagctgctgcttcctcctcaatcccttctcgaatatataaaacagttccctcgatcttcgtctccggtccacgttttacttctgtaattttaaaatgctttcttgtcaggcttctgataaccttctcaggtttctcttccgctgccggcgccgctgcaaccggcacaacagaagctggctgcatcgctggcatttgcacacctgcagcacctgctgtgattcctgtcggaatttcgatgtcaatatcttttccctttccaatgtgaatctttaacacaccgccagccgttgtgacaatactctgactggatgccacttcctctttttgctctgcctctgtttctgcaggctcttcaacagctatctcctgttccacttccttgattcctgctaccacatccggtgtaagtggcgtcagtgaatcacaagtcttcgtcaatgtcgccccaagaatctgctcgatcgtcagaactccgtccagatttaaaagcccagaatctacaagatcatcaaaaatcgttggatcttccaaattttcaacaccaatcgtaatccccgcttccgcccggcagcaaagcaccgctggatccttcgcatgttcttttgctgtttctgctgtaattgacataacatgtccctccttatatgaatgcttcccgatccaccagaccggaaagcagattaaatatcctgttctactttctttgatactcttaagtgtctgtacagcggatggtgaattgtccgcatcacgtgatctgtctggtggaatactttcagccccatctttggcgcagatcccatcactgtgttggaacagtccgaacagtttcctattataatgtactcacatccatctttcttaaactggatgctgtttttcacctgtcccggacagtttcccgggcgctcacattttaacgcaccatttttcatctcaacggcctgcttacatctcgcaaccgatacaaccttgccattcatcttcgcacagatatcgcgcatacgctcctctgtcccaccacaggcacagacaagaagtcctaccggcgccccatgaagatctggaagatcaatcgtcacgatcacccctccggttgtctttgtcactggggtatcctcctgcgctgcatgcccggtaaatggtcctcccacgataatctctccgtaaattccattaatccctcctgcacgctcaatcagttccccgatactcgtcccgatcggaacatctaaaaagacatgtggctcttcgccgccgtttaactttcctacgacagttacattcttggaaaaacatggctttctctcatcgattgcctctgccactctagaaacggtctctacgttgattacaactgcatctgctgccgtcggaagctgatccactccaagctccactccaagacactctcttacaactgctcgttcttctcccatcggataaatatccggcaagagatgaagtgtgattccttcctcttctttcagtgcttcttttaaaacgcgaactgccttttcattttttttcttaattgcaaaaattgccttggatgcatttgtcagctccatgcaatattttactccccttatgatcttgtcacactgttcttcaatctgtcggatgttatgacaaagtcccggctcgcattctgccgcattgacaagaatatatcccccgtgcaaatctgcggaaagtttcactgctgtcggaaatcccgcgccgcccattccggtgataccagcataggctaccatctcagccttcgttccttccggaatcttcacataactttctggctgttcttccttcttgcggatgacgatctctgtgtcagttaccgactccacaactccacagacactggaaaatatattggcaccaagcccgtccggaactgcgatcaatgtccctctctgtacatccgcccccggctccgtgacagccttgcatggtgcccccacatgctgctttaataaaatatgtacccgtcccactgctctcgactcctttatctgtattcactaaaagctgagtataatactcagctttttcattcatcatttaatcaagcctgcccctgtattctgacagcaacagccctgcattctctattctgttctcgatcatcactgaccatctatatccattccagtctgcacatctatatgtaagccactcaaagacatctgtgctttacattctacgcaatgcatcttccggaaccacagcctctctcgacttctcagtcggactgcggatgcatctggaacttttctccttttggcggaggcatgtgggaatcgaacccacccgggacgctcctaacgccccacactagttttgaagactaggaggcacaccagttacccatctacccccagatatgcatttttctctgctcatttactttatcacaaacctatctgtttttcaatagtaaattccaacttttttcattttatttattctttcaaactcccactttccattgactttttaggacttttcattgataatactattagaaaactgaactacgttctagtatttagtctattaacaagtctgctatcttatatacagctgacataaaaatttcggaggtaccgcaatggaaatcaatccacatttaaacacggactctttcgaggccgctttcaaagcaatcgacacacataccgtaggagaatttacgcgaattattttatccggattccccccattaaagggagatacgatgatcgagcgcaagaactatcttgcaaaacattatgacaaataccgcactgccctaatgttcgaaccgcgcggacatcacgatatgtttggtgcacttctgaccgatccgatccatccggaagcagattttggcgtcatcttcatggacaccggagaatatctgaatatgtgcggccacggaaccatcggctctgtcactgcactcatcgaaaccgggcttgtggaggcaaaggaaccttatacagaagtggtattggatgctcctgccggattgatccgaacaaaagcagaagtcaaaaatggaaaagtcttaaacgtcacactcacaaatgttcctgctttcttatataaagaaaatcttacaacagtgattgacggcaaaaaaatcaagtacgatatttccttcggcggaagctttttcgctctcgtagatctctcacagatcggcaagacagtcacaccggaaaacatccaggaactgacacgttttggaatgcagcttgtaaaacaggtcaatgaagaagtaaaaatcaaacaccctacacttgatattacttctgtggatctcgcagaactgtactgttctacgacaacccctggatgcaccatgaaaaatgtcgtaatctttggagaccacatggctgaccgttctccttgcggaaccggaacaagcgcaaagcttgccgcactgtatgcccacggccaaatcggcatgaacgaaccttttgtatatgaaagtttcatcggctctaaatttaccggaatcgtcaaaggggaaacaactgtcgggaactacaaagcaatcatcccacagattaccggaagtgcctacattaccggagcagcaacctatgtgatcgatccggatgatccgctaaagtatgggttccaagttgggtaatcttcacacaaaaagaaaggaggcagcttatgcctagaaaacgacagacgacaaagagtaagattgtaaaagctgcatggaaccttttctataaaaaaggatatcacgcaacgacaatcgatgatatcatcactgcctcccgaacatccaaaggcagcttttatcattattttaaaggaaaagatgccctgctcggctcacttgcctatctgtttgatgataaatacgaagagcttgtcgcatcgatggatccaactctttctgccgctgacaaacttctctatttgaactatgaactgttcctgatgatcgagacaagcgtggatatggaacttctgacactactctactcctcgcagctgacgacaagagaccaacgtgcacttctagatgatcagcgattctatttcacctgcatccgggaaatcatcgaagctgcacagaactgtggggagtttacttctgaacgctccgcaaacgaacttgttcatctctacacgatgtatgaacgctcactgatctacgactggctactctgccagggatcctactctctgagcaaatacagcgcagaacttctgccgggaacactgtcacagttcctcgccaaaaattaacacaaacaaagaacaaaggtttgcagaatataataaaaattgagggtatcgcccaatcattcaattagatgattgggcgataccctcacaatttttatttctgttccttcttataccatgcactcatgcatctcttcttcttgaagtccgactttctccataacgctttttaacgcttcccgctctgtcagatctgcacaccaagataatccacagcccgcagagattgtacgcggaactgggatcagtcttccggcagctccatgctccttacatgctttctccatcgccatcgcatctgctgttgtatggaaagtgatcactagtttcaattctttctttctcatgttttctacttactttcttttctttttattgtctctgcatctactcttctgacagttcccggattgcttggatcgctgtctctacttcttcttctgtattataatgcgagaagctgaaacgtactgccccttgttcaaccgttccaaatgcttcatgcatcagcggcgcacagtgtgcccccggtcttgtagaaatcccgtaggtcatcagaagctcatcgctgacttctgaagagtcatactccccaatattcagcgtcacgatcggacagcgtcgctctgtcgagaaatccccgtaaatttttacattcggaatctttttcactccgtgatagaactgccacatatactgaagttccttctcccggatctgatcaatccccgtctcctccaaatatttcactgcagctccaagccctgcgattccatgtccgtttagtgtccctgcctccagagcagtaggcatttctttcggatgatgcttattataagtatcgacaccactgccgccacacttgagtgggcggacttccaatcctgtgcggacatacattcccccggttccctgcggacctaacaaggatttatgcccggtaaaacataaaatatcaatctgcatctgctgtacatcgatcggatatacccctgccgtttgtgaagcatcgacaatcaaaagcacctgatgtctcttcgcaatttctcccacacgagcaatatcgatcatatttcccgacagatttgagccattcgtacagacgatcgcctttgtgtgtggacgaatcgccgcttccatttcatcgtacgaaatattccccgacggatcactggaaacaatcgtcagctccacaccgttttcttccattgcataaagcggccgcaatactgaattgtgctctaacatcgtcgtcacaacatgatcccccggacataacacaccccggattgcaatgttcagactctctgtcgaattatttgtaaatacaatactttttggactctccgccccaaaaagctttgccagacgctctctcgtatcgtaaatcactctcgatgcatctaaagatgcctcatgtgcccccctgccggcatttcccatacactgcattgcatttgcgactgcctcgatgacttccttcggctttctcatcgtcgtcgcagcattatccatatatatcataaccgtacctgcctgctttctttttcttgcagaaccgcagaaaacaactttcacattccctgcggttcccaccagcattttcttctaaaatgtctggtaaacctctcttgtcaccttaataaacttctctactgcctgcggcagatgaaaatttttgttgtatacgatattcagatttcttcctcctcgctgtgacggaagagaaaaacttaatatccttccatggatcagttcatcctgcgctgcgagctttgacagtacagagacacccagtccatttccgacagaccgcttgatggtctctgtattttcaatacttgcaataatattcagactctccacctcaataccattttcccgaagttgacgttccgcctctttccgcgttcccgatccttcttcacgcatgatgatcggctcattcatgatccagtcaagtggggaaccaatctcccttagtcttcggaatttttcattgttcggtgtgatcacgacaagttcatcccaataaaacggaatgtacttgcagttctttttctccatcaccgtcccggtaaaaccgatatctgcagtatgattgatcacatgttcaatcgctcttgcactgtcagtctccatcactttaaactgttctttcgggtaccgttcactaaatcttgccagaatccgtggtaaaagatactgcgccggaatcgtagatgccgcaatcgtaatacactgcggtgcatcttgttcttcatgaagaaacgcatactcaatcttccgttccagctctaccatctgctttgcatattcatataaaacggttccatcttctgagaggctgacctcttttgtattcctcacaaacagccttgtattcaactctttttccaaagaagcaatgtgtgcgctgattgtcggctgtgtcaggaataattcttttgctgccttggagaaactccgtccttccgtaaccttcacaaatgcttccagctgttttaaattcatacgtatgctaccctttcactttctgttccgtttcgttttgtcacttttatgctgtccatatattccatgatcggcttcgcactcttgcgactcgtattcagtgcatctcgaagctctgcaatcgtgatgatctcgcgctccctcagcattccttccacaatctctcttgcttcttccatgaaatgcttccttgtatacagatcctctgccacctttaccacacttccctcatctacaagaaacattacaatatcttcggccatcggacgttccttctcctcaaatgggatctcagaaaatttcgcgaaatcaaattttgcgtcttcaaacacagtgatcatctgatcatgcagtctctgatatctttcatcttttgggatttcaaactccggcaatgccaaaaattcctgatggcgtctcaagacacctttctccacaagcaattccatataaaggtcaaatacattcgccttgactttcttcaaataagtcatatgtacttctgcctttttcataccatatcgatacggatgactgttatgataactgcgcagtgtctcacacaaagtctctctcattgcattttcactcgccgcatgccatacatagacatctttcttcatctggaatacatatacttttccctgtgcttccagtgatcgtacatctgcctccacttcttccatagaaagtgcagtcaatttcgcaagttccccaagtgttaccatcgtctctgcatgcgccttgacatgaagttcgataatatcctcggaggaacctgattctttctgcttcagttcctcgatcacatcctgctggaaacgcttctttcgctctggatttggctccagaacaacacctcccccgattgtctccatcggagaatagaaacggacaacaaatttgtctccccttcgcaatgccacctcttcttccagacgaagctgcacatatccactctctcccggacccagatcttccttgtcaagaagtaccgcccgacaaagcacttcacttgttcccgtgaagaaatgtagtctcgcatgattggtcaacactcgcatcgaagatgggagcatattcagcttcacatcaagaagcattgtatttttcatactgttcggcggcgccagcacacatcctctcgcaatttccttcttttttacattcgagagattgattgccacacgctgccccgcataacagcggtccacatcctgcccgtgcacttgaatacttctaattcggcactctttgccaatcggatacatctcaagaacatcttccttgctgatacttcccgtcagcagcgttcctgtgatgattgtcccaaatccggataaagtaaacgcacggtcgatcggaagccgcgggatcgtgttgatctcttttggctccacctcttttgccgtcatctgctcaattacatcgatcaagtgtggaatcccctctcctgtcgctgcagatacttctacgatcggagcatcttccagaaaagtgccttccagttcttccttgatttcttcctccacaagttccagccactcctcatcaaccaagtcacatttgttgataacaagaatgcttttttcaattccaagcagcccgagaatatccatatgttctctcgtctgcggcatgattccttcatctgctgccacaacaagcatgacaagatccattccaacgacgcctgccaccatgttgttgataaatttttcatgtccgggaacatcgatgattccgacacgatccccgtttttcagatcaaaataagtaaatccgaggtcgatcgtaatccctctcctctgttcctcctcccaccggtctgtatttcgcccagtaagcgcttttatcaaagttgtctttccgtggtcaatatgacctgcggttccaataatgatattcttcatctgtactgcctttctaccttcggggatctttgccgatccccttttttctgattcaggcgaatctctttgcttccccttactccaatatctcttcttctttgagcatctttgcgatcttcggataccatttcttatccactgtgcgcacatcgatcacaatcttgtcattcattgtacgcacgatcatcggaacagacatatgtctcagccgaagttccaactctgctgtcgtaatcttttccggatgaatcgtcacagccatacttgggatcctctccaacggcagagatcctcccccaatctgtgactcacatggctccatctgaatctgagccggcaattctgcctgctgtaacagtgcttccaattcctgcgcatctcttgtaatctcttcaatctcttttgtgatcatgcgaagtgccggaatattctggattgctttttcctcagataaatactcctgtaaaacgacctccaacgttgccgctgtaaacttatcaatccgaagtgctctcgtcagctgatttttcttcatctggtcaatatatttcttcttgccgacaatgattcccgcctgcggacctccgagcaacttatccccgctgaagcacacgacatctgcaccatttcgcacagaatcctgtacggttggctcataggtcagtccatatttgctaagatcgatcagcacaccgctgccaagatcttcgattacaggaatctcccgctctttcccaagcggaacaagttctgcgatacttacgttatctgtaaatccaacgattcggtagttacttgtatgtacttttaacagcgctgccgtctcctctgtgatcgcattttcataatctgtataatgcgtcttatttgtcgtaccgacctctacaagcgttgctccactctgctccatcacatcgggaatccggaattttccgccgatctctacaagttctccccgggagacgatcacttcttttccttttcccattgtgctcaggatcagcataactgccgccgcattgttattcaccgccatcgccgcctctgctccggtaatcttgcaaagtaatttttcaaaatgcgaataacgttcccctcttgctcctgcttccaggttatattccaaattagaataattcattgcaatatctgcaatatgtctcatatgacgctccccaatcggtgcacgtccaaggtttgtatgcaaaattgttccggttccgttgatcactgtacgcatattcggcgtatgcatcgcctttactgcctcctgaatccgtacagacaattgttcaatctcccggattccttctgcttcgtcttcgcatgttccgatcaacgcccggagtttatccaactcctcccgcaccgcttccagcacggtatcgtaactgtactgctctgtcagctcccgaatcttttcatcttccagcagtacatctaccttcggtatcctgcggtataataaattcttattcattttactttccttacttcaggtgaatcaatttctcacccttttccagtacctttccaattattgatattttcgtatccattcccttttctgcaaaatcttttatcatttcttctgcctgctctggggagacactgactaaaagaccgcctgatgtctgtggatcatacagaagatctacataatgttctgcaacagttccacagtctacctgatcgatcgaatatccccggttcttataagctcctgccggaatcagccccatctgtgcgtatgagattgcctcttccagataggcaatgtcttccacatgcagttcaaaggtaacttcacttgccgacgccatctcgacacagtgacctaatagtccaaatcctgtaatatcggtgcaggctgacacatcatatttttctacaacttcctttgccttcttattcagagatgccattaccgtcaccgcttccttcacagcagcttccgatgccatctccgctttgatcgccgtgttgacgattccggtaccgatctgctttgtcaagatcagtatatcccccggtctgcatccgtaatttttaaaaatcttcttcggatgaacaaaaccggatacacaaagtccatattttggctcatcatcctgcacggagtgtcctcctacgagtaccgctcctgcctctttcactttatctgctcctcctgccaggatttctcccaacactgccggatccagacaattcggaaatcctacgatattcagcgcaatcttcggttcccctcccatcgcataaacatcgctgagagaatttgccgctgcaatctgaccgaaagtataggggtcatccacaattggagtgaagaagtccacggtctgaatcagtgcaatatcctctgtcactttatagattgccgcatcatcggacgtctcgatgccgacgagcagattgtcatcatgaaattttggtagcttacccaacacctgggcaagtgtctctggacctatcttggcagctcaacccgccgtcttcgtcaactgcgttaatttcacgtcttttttcatcgcttttttgttctccttctctctgtcttttatctttgtttctccttcagccggattttccttatatgaaataaaacctctttttgcttgctaaggctgaatgatctttcctgcctctgccatcttctccacgattgtatacatatttgtcacagatcctacttccagcttatctgtcaggccgtaatagttcagacatgttccgcacgtcagaatctcaacaccctgcgcttctaaactctttaaatcttccagagaatccgaaccttctgctgtcaaagttgcccctccattgtagaagatcatcgcctttggcaattcttccagctgtgtcaccgcaaaaataaatcctttgatcagtacctttccgagttcatcattaccgcttcccattttgtcagaagcgatcacaacaatcgtatctcccttacgatctggtgtacatactgcttcctctcctgcttccttggctactgcaccgttcatctggatcgtcactttaaattctttctctcccaatttttcagaagttacatttccccctgagctaactgccatctttgtcacattctgaacagcgatctcattgtccacaagtacttctatcgtctcaggacctgtaatctcctgcattgccttttttgttttaattactggaatcgggcagttatcacccatcgcatttactgtaatcattttcatatccacctttctttttttcaagtgccccttcttcttcacttatagatacattctatcactgttttccactttggtaaacctaattttctacatttttcctccaatttccccaattctacggttcttcctgcaaaatcattgaaaaaagtcggattctatgagaatataagaagaaacgtaaaatcaatactcaaaaaaacagcatgaaaaattcctgaatggaacaaacgtgcctgacattgaaatagcaaacttaactattctaagagaaaacgaacaacagaaaggaataaaaatatgtggattgcagatcactggaaagattatgaagttattgactgttcaaacggggaaaaactagagcgttggggagactatctgctcgtccgtccggatccgcaggttatctgggatactccaaagtcacacaaaggatggaaacatatgaatggtcactatcacagaagttcaaaaggaggcggtgaatgggaattttttgacctccctcaacaatggcagattcattatggaacgctcaccttcaatctgaaaccgttcagtttcaagcatacaggactgttcccggaacaagctgcaaactgggactggttttctgaaaaaattaaaaatgccgggcgtccgatcaaagtactgaatctttttgcctacaccggcggtgcaacacttgctgctgctgctgcgggagcacatgtcacacatgtagatgcctcaaaaggaatggtaaactgggcaaaggaaaatgctgtttcttccggcttaaaagatgcaccgatccgctggctcgtggacgactgtgtcaaatttgttgagcgtgagatccgccgcggcaacacatacgatgcgatcatcatggatcctccatcttacggaagaggtccaaaaggagaaatttggaaaatcgaggatgccattcatccactcgtgaaactctgtacaaagatcctgtcagacaatccactgtttttcctgatcaattcctacacaaccggacttgcaccggcagtactgacctacatgctcgccacagagttaaagaacttccatggaactgtagaatcttccgaaatcggacttccagtatcagaaagcggacttgtccttccatgcggtgcttcgggtaggtgggaagccatttaattttgtctctcgctttaccatcatctacgttatctgattgtaggttttttttgtacttttgttgatttcatctgcaaaagcttgcttttccagtttgattttgttacatttgaattatctaaagtacaaatttctaatttatttataagcatggaaactggaggagaactatgatgaagattttcaaaatgaaagattatgaccagatgagccaaaaagcagccaatctcatcgctgcacagatcattacgaagccagactgtgtacttggacttgcaaccggttcctcaccgatcggtacatacaagcagctcattgaaaaatataacaacggagatcttgatttttccaaagtcactactgtgaacttagatgaatacaagggacttcctcgcgacaatgatcaaagttattactatttcatgaacgataatttatttgaccatgtcaacatcgacaaagagaatacacatgtgccaaatggaatgatcgaagacagtgagaaagaatgtgctgactacgaagctctgatcgcttctctcggaggtcaggatcttcagcttctcggacttggtcacaatggacacatcggattcaatgagcctgcagatgattttgcaaagacaactcactgtgtagatcttcaggaaagtacgatcgaagcaaataaaagattcttcgcttccatcgacgacgtaccaagacaggcttacactatgggaatcggaacgatcatgaaagcgaagaaaattgttgtagttgtaagtggcgctgacaaggctgacatcgtagaaaaagcatttttcggaccggtaacaccacacgttcctgcttccatcttacagatgcacccagatgtgacagtcgtaggggacgaagcagctttagcaaaagtaaatttataattttacttgctgcgtgaattcaatctaaagatattaaaaaacttatatcaaaattttcataaaagatgctatcctgacttgtatcactcacaaatcgggatagcatcttttgttaaaattctattatttatccttcctaccacatactaatatccctgtgctctaaattttcttcgcacagatatctgccagacagcatctgtcgcagtgtggttttgtgcgggccgtgcacacttcccttccgtggtatacaagtctgtgacaaaaatcgcttccttcctccggtgggatgatcttccaaagttccatctctactttctttggctccttaatgccatccaccagtccgattcgatttacaagacggatacaatgtgtatccgtgacgattgccggctccccaaatacatcacccatgatcaagtttgcactttttcttccgacacccggaagtttcagaagttcatcaaaggtcttcggaatctgtcccccatactgctcttttaaaatcttcatacatgcgctgatgtctctcgccttgctttttccaagcccacaagggcgcacgatctcttcgatctccgccacatccgcgtctgccaacgcatccacatctggaaatttttcatataatttctctaccacaatattcacccgttcatcggtacactgtgccgccagtcttaccccgatcaacaatttccatgcctggtcatagtccaacgtacactctgcatctggatattcctcccgcaagcgctcgatcacttccagcgccagtttctgcttttttgtctttgccatctttatcttctcctgtcatcccgtaatttctactgttctttttctgttttctcacggtctgtcttctttttattttgtttttctattttacatcttttttcggattctgtctgcaacatttttcccatcttctgtgaaaatccagctgtttcttcctcttccccgaaagaatcctcggtttcttgcctgtctgtgacaattccttcctattgttgtttgccgcttcacctgcgataccatatagtagatccgaaattgaaaatgatcccattccatcaccgtaaaaggatgctcctccaaaatgatgacctcaaactctccccgatgatactccggatatgtacctgtaaatcctgctcgaatcagtttctgttccgcctgcttccgtttttctgcaatcttttgatgaaatgccgttccataatcccgcttttcataagtacctgactcggcttccactgcctgtaagatggtttcgtaaagttgctctctgcttggatccgtcagcgctcttgtcagccaccgttccagagatctcgatggaaatctgcggtacaaacgaagcagtgccaaatatcctcgatcctgtgccatcgccgcaaactgctccatacatgcaattccttcataagtcgcaggatatttttcttccagcgactctcgtaccggggaccaattccgaaatggagcaaactctaccagcctcaaaagttccaattctccttctgtacagacttcttctcccacatacgcaaatttgtcatagatcgttcctgccatatagacaagccgcctccactgctcctgtccttccatccaaaaatgccctatctcatggtactgatagcaggttctagattcacggattttttcaaaatgcagtgtaaacaccgtttcctccccatgaagcaagctcttctgccgcacaacaagtacataagcgccctctttcccggaaatcctcgcagacagttccaatcctcccgcttgctcttctgcggcaacctctcctaccattcggcagttttccaagaccagataatcctcaatcgcatcattcatcatatatgggattaaataacttttcccgctttcctcttctttctcttcaggttcctcgcaaagttcaaatacttgatatttaaaaatctccgcaagcttccaaaacgctaacggcatctgctcctgcagcccatccagatattctgataattcctcccgtactttcactgcctccatactctcacctgcctctctgccatcttctttccttccgctcttttatccacagctgttcctataactgaaaactctttcgaacgatcctctcaaatgcttctgcaaactttctgtcatcctcctcggtacgtctggcaggtcctttcagatgatgcttgctctttgcccttctggctttcttagccatatgcctctccatcaggagcctgtcaatattttcatttgtatactctcgtccattttgatggatacagtaagcaccttttccaagcaccatcgccgcaacaccataatcctgcgacacaacaatatcccctctgctacatgctccgacaagtgcaaaatcaactgcatccatccccgcaccgatcactttcacttcactataatcagatgacaatacatgattcgtatcacaaaataaaatgcagggaacactatatttctctgcaatctgctcaatcaacctgataaccggacatgcatccgcgtctactaaaatcatatatctcctcctgaatctgatactattttccacatcttatattttgcttcccgcttttttccacatttcccatctttcatccacataaaaatccccatcctggcttttgacctgttcttcttcttgtgatagaatgactttattaaattgccgttcgaacggcagaatggagttttttatgaaacagattgcaataacttatcctgatgacaaaactttgatgtaccgtcttctcagaacacaactgaccggactggtcgacggagttcctcacctgaccgcaaatctcgcaaatacttccgcacttcttgccggagcactgcgcgacattaactgggtaggattctaccttctgaaagacgacactctgattctcggaccattccagggaaaacctgcatgcgtagagatcaaagtaggaaagggagtctgtggtactgctgtcgcagaagactgcacaatgcttgtgccagatgtccacgcattcccgggacatatcgcttgtgactctgcctctaattccgaaatagtcgttcccatccactgcagcgggaaagtagtcggtgtcctcgatatcgacagtccatgccttcatcggttcgacgatgaagaccgacatggattagaatgtcttgtccacacgctcgagggaatgctgtccgaatcccttctggaactttgctaaagagaagctcatcctacaaatgctcttatgcttctgtcaaaatccgaatgatctgcacacgtctctgtgtcatcagcgcaagcacattttttgcctgcgctgtattttttctggcaaatgtattctgaagctgtggaagaaatttcttcatactctgcattctcagccgctccatcgtctgaccgattctccgcattgtcattctcgcagctgaccactgccctcttgtcactgtctgcccaagccgcaggaactcctgtccccttacaaactgctccaattctttaaaatattgttcttccccaaactgctctattccttctgaaacacagattccaaactgctccagtttttttatctgcactgttctgtctgccactatttatacctcctgtcacttcttacatatgccttttttcatgatctccggtcagttcatagtaaaaaatgtactgctgcatcacacccagcatgcccttatatctgcggtttggaaatcctcgcttatagtgcttctgaagtgcctgactgatgtgtgtatctatcggaaatgcctgcagatgatgaagcgcaaacagacagatacagtctgcaactttctcaccgactccaaacaactttaacaactctttctttgcttttgcataaggcagatgtcggattgcatccagatccacttcccctgatacaatactttttgcagtccgcacaacgtatttactgcgatatccaagattacatgctttgagatcatcatccccaagttccgctagtttttccggctccggaaatgtataaaatgtatttccggaatcgcttgtcctctcctccccgtatgtctcacacagattttgaatacacttccggattctcgtgatatggttctgctgggaaatcagaaatgatgctatcatctcccacaaatcctgccggagaatccgtatcccactcccccactctgccgccgcgagcaagtaagaatcatttgggttaatcccctctatataactttgataatccgtttccaaatcaaaataatcgttccatatctcctcaaactcgtgcggtgtgcagaaaaatgtacattgctctccctcctgcaagatttccagagatctgccaaatgcaatcaccctgtaacagttctccgatactctctccatccgaaagcactgccccgaatcgcagatctgctgcaagttgaaatgtttgctctgtcttatcaccatatcgtttcctcttctcatctttctctagtatagaaactgccctattatatctgcttcttcacaatctggtactcgtctccgaactgataatatggacaatcccggaattctccccggacaaaccgatacatctcatcctcatccagatttttgctgcacacataatactcatactcttcatcgtattcataattcatacagctctcacagtttgttatccttcgtttttgtgtacttttctttgtcactgaccttgtcagagatttcccttctgccttttctccgattgtttccatttcattttatcctttcttcctcaacaactactcaaaccactttttctttcgaaaaatccacacttccactgccacaatggcaagacaaattgcacttactactatataaccgtatttcgcgtccaattccggcatatttttaaaattcatcccataccatccagcaatcaatgtcagcggcataaaaatggttgtaacgactgtcagaattttcataatttcattctgtctaatatcaatctgtgtctggtgcatttctcttaactgcatcgaatattctttcagattctgcaccatcgcatataacctttctgctcgctcgtaatacagtccgaataaaaacttatcctgctcatctcctaattccgccgcattctgctgaagggtctcgccaacatctgacaactgttcataataggcgctcaatgcggataaatcctttctgacctcaagcagacttctgttgaagtcctttaattccccatctagaagcatctcttccatctgagtgagtttctcctcatactgctgcaaatacagcatatcatctttgatcagatactccataaaatcaaacaacaataaggatgctgatgtaatatctgtcatctgatatccctgcatctcgtccaaaattctacggacctctccgttgttctcaataaagatcagtgtatcctctaacaaataatatccaaaccgaatcttctctgctgaagggtctttcttccgcggaattgcaaatgtccccgacactctctggtagaaacggtctgccttacaaaaccgaatctgctccaactcattacctttaaagcttcttggaaacttctccgcatacaacctttgaaattcttctggcgtcaacaactcaatctgacaggacttttggctgtcctcccacttatagttcatcgtttttctcctttttctaaacttctttagattattaagaaatccttttctcttttgtcacactttcctcacaactttattttatcataaccttatcaaaacaaagaagtcaatggttgcatttatacttttattatttgtggctattgtacttcgcctaactactacgttttgcgtttacatagagctttttctttttagccggtcaagatgtatacaacatctttccggctttctccacaaagtgaaagaaaaaactcacctcccccggcagagtttcttctttctatgagttttcattactttcgccttctgccatttcccttctattcttttagcagaaatggcttatgtatcggcgtctccatatcccagattttatattccccttcccaataataagcaggtttacacccgccgctcttgaacacgcgcataaaatcttccatcgtatacacatcttccgggaaatacgtcgcgaaaaatcctactttctctcttacatggcaatcgctggaacctacggtaaccaaccctaactctttggcataatctgccgcctttttatttgcttccggcaatgtgcttccatttaacacttccaccccgtccagcccatgaacaattttcaaattctcttccagcccacggttgttgttacgaaacggatgagcactgaagcaaattcctccctgcgctttcacaaggtcaataaatttctgagcattcactcgctctttcggatattcttcaattccgaatgctacaatatctccttgtaaggaaaaaaattcaattccgacaaagattggaaatccagtcttttctgaatattccgccgcatactctttcagacccatatcatcgtggtctgtaatgcagactgcccccagccctctcttttttgccaactctacgatttcctctaattttaagtgactatctttggaataggtacactcatgcatgtgtaaatcaataaacattttacgccctgattcattggtcttccccctgaatctttcccctttctctgtatctttacaccgaaatcctgatgaaaaaattctattttcccgacaagtgtacaaccatctattgacaagcaagaatatctctgcacactaatcacttctaaaaataatgttatcactccagccacgttttttctaatagaaatataaaataagacagaacacttattcgttttatctatgagtaacccaaattttctttatctcaatacacattcgctgatttttctccaggaaatctgagaaagctgtggagtttcttcttctgtttgttccaacttctgccgcaatgcttctgccaatcgctgttcaaatgccgggagttcttctgccaccggctcatcggtgttctccatcctcggaagttttacgaaagtaatctgctctcccggaacattttcctcaaaccagtctttcattcccggaatatctgaacaaactactttgcatccgcatgccatcgcttcaatattgacaagcgccagcccttcaaaaaaagaagggagtataaatacatcgctttgtcgaaattgctccgccaattctgcttgagacaacattcctaaaaactggaccggatagcgacattctatcgccagttgctgtatctgctcatattcctcctccggcccatgtccacctgcaagcacaactttcaatttttcttttggatacggaagataggaaaacgcacgcagcaggctacatactcctttcttttctgaaacttttcccgcaaatataatctgaaacgattctttcttctcctttttttcaccagtttgaaaaaagattttatcattgtaaccgacaccggtaacttttattttttcttctttgacttgaaaaattctttcgatttccttcttttgttccctgtgcagtgcgatcactccgtctaactgccgaatacgttccttgatatactctcgctccagagtattcttttctatctgccgcagatccgatccatgacagatggcaatgatctttttccccggataccattccctgaccatcgctgccagaagataaaggtgatgacagacaatcacatccgggttcagttccctcactgcatcttcaatcgtacggcaaaatatttcccgaaattgccccaacatctctgatgtcagatccttgtagcatgtgctctcatacggcatctcgtcagacatccccgtaattgcaaatggaagtgcctctgtctgataaaataccggatagaacttcaccccatcaggaaaatcaacctgatcttcctcgtaaactcccccgacaacagactgttcatgtcccgcttccgcccagtttttcacaagttctgtcagatagacaccgcttcccgtgctgtgtggtttctgtgctgtaatactcaaaatcttcattctcttttgtccctctttttttcctcttcatttcttctgctgtctggaaaggcagatacactgccttttcatctacatgaaataaatttattataccacactctacttgatttttgtgtcgtctaccagacttttcgttaaatgtacttaaacaaaatcatagctgatccgatttagctctcctcaagtgcatttgccatctcttcctgtctttatccatttctcttgaatctttttcttttcgcatcggcctttacttactttaagcatagcaaagcgctgattcttccacaactgaacagatctcaacaaaatgtccggaaaaattagcaactgctcaataaaatttcctgaagtactttgatttcctctgacaaatatttatttttatgaatggcaagatgaatgttccttgtgacactgatctcctttaacggcagtatgacaatgcttccgtcttctgcctctttctcaatcattcttcttgagaaaatggcaatccctcttccacggatcaccgcatttttaattgcttccgtattcgtactgcaaaatgtcctgcgaagctgtactccacgatcctcaaacatcttttcaatctgattgcgctccgcgctgccactttctctgctaatgtatgactccccctggagcatctccaatgtcacacttctctcttttgcaagccagtgatctcttccacaaacaacaaccatctcatccttacagacaggtgtcaggacgagatccttgctttttaaaattccttccacaattccaagatccacttcattatttaaaatctgtctctcaatctctgaagaattgctcacattgacactgatcatacattctggaatccgtttctctgcctgatccagaatatcattgatcaggcatgtgcccacagatacgctgcatccaatcctcagacttgttgtttctactgcccggttcatcgccgcttccatatggtcgaacgaatcgagaatatgacgggaaaaagagagcatcagctctccttctttcgtcaaatatatcttttgtgaaagccgttcaaacagctttactccataatgtttctcaagttctgaaactgcctggctgatactcggctgagagatgtgcagcatctttgccgccttgctcatcccgccgtaatctgctaccgccgtaaatattttcaaatgcctgatcgtcatatattccttcccttctatcttggtccctgctcttctttttccctaaaatcttcggatttttctgcttttccggatgaacctcacagtgatttagatggctcccaacagtgcataaattaccgtcccgacaacaccgcttcccaaaataattgcaattgcgcttactttgtatttcctcaggaggaacagtgctacgacaaaaatccccaactctacaacgcgaagttcaccaactaccacttctcttaactctgcctggaataatcccaacatcaaaatagacgcacctgcagaggcgatcagagatacgactgccggccgcattgctccaagaacaacctgcacaccaccaaccgaacgatatttataatagaaatgtgcaaggatcagacaaatgcaaaaggatggtatgatacatccaatcgaacagagcaggacacctggaatcccggcaatccgcattcctacgaacgttgctgaattgatggaaatcggtcccggtgtcatctctgcaaccgtgatcaaatctgaaaattcttccagtgtcattaacccgtaaatattgacaatctgttcctgaatcagtggaatagcagcatatccaccgcctacactgaacattccaacttgtatgaaagcaaaaaataattttaataataacatttatgcaatccctccattctttttccgaaaagttcctacagcaaggtccagcagaccaattccaagacaagcgagaataatgatcattgcgctgacatccaacagatacgtcgcaacaaaagcgatgatcatcatggaaatatacagaatccgttttgtctttatcacatttccagcaaggttaatgactacgtcaaagataaccgctgccacacctgcccgcatcacctgcagcgctgtactgatatacggatttgtacggaactgttcatagaacagtgagatgatggaaataatgatcatcggcggaagaattgtaccaagaatagctgtcagtgaacctattacccctgcgatccgatatccgatgatcaccgaagcattcaccggaagtggaccgggcgctgactgtgtgattgccgtcacatcaagcatctcatcctcctccagccactgcagctcttccacaaattttttcttcatcaaggatacaatgacaaatccccctccgaatgtgcatgcactgagcacaaacattgacttaaataacacccatagtttactataatcctttttcataatgctctcctccattttctatgtaaaccttctctggtcttccctgtttccgaaatgagtttatcacactctatatcatttgtaaaatacataagttttatataacttataggctattacttatagtatttttatctttccctcaaaatattaaaaaaaagactgttgaaaaatgttttttcattttccaacagtcccacacttcacccacgaaaaaaggaaggatctaaccttttacagatccacgcatcatcccggaaatcaaaaactttcgaaagattaacgctgtaatggccggcggaatcacagttataatccctgctgcagcagtcagaccgtattgaatggagtcctttgtcatgaactctgatacaacgatcgccaccggttttgtctccacagaagaagcgagaattaacggaatctgaaactgattccatgtgtttaaaaatatgatcaatgctgctgagaggatgatcggataagaaatcggaagaaaaatcctcataaaaacagcaagccttccgcagccatcaatcactgccgcttcttctaattcttttggtatcgtagaaaaataattggacatcagccaggtaatcatcggaagatacgaactgacataaacaaggctgagccaaaatacgttatccaacaactgtctggcaacaaaaatccgaaacagcggaatgatcgtcgccatgacaggaatgaccatcgtgatcaaaagaagattccggataaattttctccctttaaattccatacgactcaacgtgtatgcactcatcagacagattggaatcccaaccaacaaagtcatgccaaccgcttttaacgaatttgcgatgccggcaaacaaaagctgtcctttccgacttcctccaaacagttccagatagtttttccaggtaactacttccggaagaagcgctgtcgacttcgcaagcatcgcatgctccggagtaatagacaaaataaacgcccacacaaatggtccaagcgtcagaagaaggaatacaagtaagcacaaaacataccctgcttttttcaaccatttcattagtattccacctccttattcagactccgcaagtaaaagattcctaagattgcggcgaggaacattaccagataggtaactgcgcttccttttccaaagtccaggaaactaaaggtcgtcaaatagctttccacaaggatatttttccccagatcgctataaccagataacgcaacaatctcatcaaaaacattgatcgctgtcaccgaagtggatgtcactccgattccaataaacggaagcatcagcgggaacgtgatccgccgaaaaatatttggaacatttgcgccatcgatttttgcagcttcatataattcatgtggaatcgactgtcttccggcaagacataccagcgccataaacggaatgctcctccaaattactacaatggatacgacaaagagaagtgtccacctcgaattgagccattcgaccggctgatcgaccactcccattccgatcagcagcttgttcatcagaccgtatcccgggtaaaaaataaatctccacaaaattccatttacataaggcggcagtgcccacggaagaaccgcaactgcaagcagaactccggaaaactttacttcaatattcaaaaacagagagagcagcaccccgagaatggttgttccaaacaaaatcagtacgagaaggaacaccgtattctggaggctgtaccagaaggactctgattttaaaatatttatgtagttatcgaatccaataaaatgaacgtcatttggcgcagtcagtttccaatactttaggctgtaagaaaaggttgctgcaatcggataaaatactaatacacccatgatcaatatcatgggtgtgagtaaaagatatggtaaaatcttctttttcattatttctgtcctgctaactcagtgatcttagtatccatttctttgaaagcttcttcagctgtcagttcaccaagagccattttattgattgcattgtacattgcattgctcatctccgcatagtaagatgggattccatccgggaatggagaagaaattaacttcgcctcttccaacattgcaccagcattctgaattttatcatcgttgataagttcttctaacactgaatttcttgttggaatcgcactgtttgtttcgtttaattttttctgcatatcagcagatgtataccactcaacaaattttttcgctgcttctttgtttttagaaaattttgttacaccaagcgcttctggaagagccattgtcacttcggattttccttcttttcccggtgtaaggattggtgtaatctgtccgacaacactgcactcctctggatttgtgcttctggatacaaaagaagtcggtcctgttaagaagcttgcgcttccacctgtcagacgtttataggcatccataccagatgaagtcttatctgccggatctacaagttcttcctgaatcagagtttccatgtactttaaagcctctgttacagattcttcatttaaagtaccatcttcattatagacaacaccattcatcgtatatgcaagccacatcaagcaggtcgttgttttttcctctgcatttaatgcaattgcaaaaggatgctctactgtccctgtagattttaatgttcggcatgcttccagcacatcctcccatgtctgaggctcctctgtgattccggctttctcaaactgttctgtattatagtaagataaacggtaatcgtttgcatatgggattgcaagcacttttccatcttttgtaaatgtttccagagtaggcatatctgcttttacttcatcagaaacgtctaatggctctaaccagtcagccgcataaaattcaccaacccatgaccagtctacttctaccacatctgcaacggcctgtcctcctgcagctgcagtaaccattttttcacgaatatcatcccagccaacttcattgactacaacttctattcctgtttcttttgtaaattcatccagctgttcatctgtcgggaccgcccaatcaggagccataaatgtaatagactgcgcttcttttttatcttcttttttacttccttcagttccgtcggctttggaaccgcatcctgctaaagcagtcactgacatagcagtcactaataataaactgactaatttctttttcatcttgtttcctccttgtattgttttctattcctttttagtttaacaacggaatacatgtaattcaagctgatattataaataatcatgtaggtgatgtcaatgcaattgtttcctctttccaaatcatattttattttccgggtactaaaatcaattcacaagtgcattcctggtatttttcctttacctgctcatttacctgtctcaatgcagactccaggtcccgcacagacatactttctgttgcaatctgaaaataaactgcgatccataaatgtcgtcctgtcttagtcacatcataaaacacaggggaaaactgatatttctctaaaatcggattgcaaagtgttttaatctcatccactacatgtttttccggtgaaaacaaaaatacttcttttatcgcattccacaatactttcacactttccggaagcatgaagatcatcactactaccgccacaatctgatcaaaatatggagctacaaacgcaatcggtgtgcgctctaaataaagtgatatgaaaaaggcaaatgacatacccaagctgtaaacaatatccaatttccatcctaacaattctgcttcaatggtaggagaggataaatttttgttccactttttcataatcacaaaaataataatacttgctatccccaaaaatagttgaaaaacagaaatttgtgcattattcaccgcattaccacccgataatgccgactcaataatctctgccgaaactcccattgtcactgacagcatcatgactcctttgataatgacaaatatggactcaatctgaaaatatccatagggatgtttttccgataccggcttatgaaacaatggtgttaaaaatagtaacaaagcgataaataccaattcggaagcatcatataccgcatccgtcagagctgattgtgagtgactgtaaatagaaaatataaattctatgacagcaaacgcaagtcctgaaataaaggacatcattaaaatccgcttctctttcttttctgttatcatgacatcaacctttcttcttaatagtctgatctttctattttgtacctgctcccaggtcttacagaagtagaaaatagactaccgtttttccggtagcctatgaatctcttatttattcttttaatgtccgcagtgaccacttccgcatccgccgcctgcacagttctcatgatgctcgtgttccccttcatgatgactgcatttcacatttggatcataagaaagtgcttcgtttaaaaatgcctcaacagcttgatctgcctctccggtcactcctccataaagcttgattcccgcttccgcaagcgctgcctgtgcgccgcctccaataccaccgcagattaaaacatccacttgatgctccgcaagcagtcctgcaagcgctccatgtccgcttccgttcgtgtctacaacttgactcgttgtgacttttccgtcttccacctcataaaatttgaagtgttctgtgtgtccaaaatgctgaaacacctttccttcttcatatgttactgcaattttcatttgaatcttccctccatttcgattctgtcaatgccagtaaacaaagttcttttctctctatttatgaaccacactggtatttcttttttattatacacccaaaacggaagccttacaatcttatcgtcccttttcttttcagttctctttttaagaagaaacgtctgtgacttcattacagaattttctttttgtttctgcgatgatatagccatcacagatcacatactatcgtaaggaggattaccattatgcacattcaattagacgaacgtcttaccagttatatgaaagaacatcacaaagaaaatattctgatcacttctatgctctgccatacttgaggcggctcccggctggaggtttcagcaagatttatcgacgcagaggaaactgccgcattaaaagcagatcattttcaagtattccctcatccacttgggaacgtcctgatccgccgtatcccacagcacatggaggaaacagtgacacttggactctccaaattttttaaaaggatcacggtgcaaggaatctactccgcatagcagtctattttttagcactatccctttggagaactgtcattctaattcattagcgtgacagtatctctaccctaaaataaccggctcatcatattcgactccccatgtttctactatcactttttccatgtattccggctcaatcggttcattgacatccactcccggaattccaatatctactttttctgtcggaagtgctgtgatctgttccacaacttcccagccttctatgactttcccaaatgccgcatagcctccatcgagacgtttgccagcttcatccgtcagtgtaataaaaaaacagcttcccgaagctacatttccctctccgcccatcgcgacagtcccgcgctcaaacggaatatcattcggaaacccgttatttcgatattctccatcgagtgagattgcacacctttcatcctcaaagtcagaataactcggctgcaatacaaatcccggtgcaatccttctaatcttccggtgatcaaacagtccttttttcgccaaagaaataaaacaattcaccgtatttggcgcctcttttgggtatagctctaccttaatttccccaaatcttgtcacaataattgcaataggatttcttttttcttccatatccctctctcctttttctcaaacttttcatttgtgatccgctttttctgataggaaaaacgtgcgtgaaacctctccagcttttcacacacgttttttgaacccttccttatatccgatgcagcaatgctgctctcatgccatctgccagtgcacgattaacgctttacaaaatattcttcataccatacaaggaacgtatagattgtccaaacttttctccagttgtcagaatttcctccgacatactcatcaaagattgtattgatctcttctacattgaagaatttctctgccatctcgctgtggaatttggcgcgcacatcttgattatagcggtcatctgccatccagatacggattggcacgataaatccgagtttctttcggaacgcaatctcttccggcagcattttctgtgccgctgtacggaacgcaaccttattctgctcttcattcactttatacttcgaaggcattctcgatgcaatatcgaaaatacgcaaatctgtcaacggcatacgaacctcaagtcctgccgcctcactcatcttatctacattgaggtaaatatctccctccagccagatctggatatcgatattagacatctttgtcagaggatccagcccttccatctcttcgtaaatactctgtgccacttcgattggcagtacgtccgggtcatattttttcaagatctttttcttctcgtcttctttcataatgttcgtgttaccgacatagaagttctttagattctccccgtatcgctctgcattgcggtacatattgtacccaccgaaaaattcatctgcaccttctcctgaatagcagatcttcgtatgctctgcagtcgcctgacatccaagtgcaaacacaatcgcagaagcatccccaagcggctgctccatattgtacatgacatatgggacaatattaaaatattcctctggattgatcacacgtctggaaatcttacgttctaaaatgcgcgcagtctctacagccagtacggactcatcgaaccgttcttcctcataaccgcatgtatccgcagtatcggcatcagacatcgcaagtacataggaagaatccactccgcctgacaggaaagactccactcgctcgtctgaagtctttacttccttcatgatctcgccaagtgtcgtgtggatctcgtctgcccattcctcaagagacttgctgtcatccggatgaaattccggcttccaatagcgctttactgtcactactccgtccttccagataaggtaacgtcccggaagcagtttcttcagtccgcggaaaaacgtattctctcctgccacgtaagtcagactgagatagatctgcagcatctcctcattcaattctttgacaaaccctggctgctccatgattccccggattgttgttccatagagaagctgtccatcttccgtctcataatagtagaacggcttcgtgccaaactggtctctgagacagaatagctgtttttcctcttcatcccagagcgcaaaagcaaacattccatacaaatgcgctgccatatcaaactgccatgtctcaaatgcccggaccaaaatccgctcctctctctctcttctggataagcttttgtcaatgcaaagctcttcacaaagcgcctcccagttgcgaatatgtcctctgtattcctgaacttttatcatatgtttcccatccttataaagtgtaaattcatcggtttccaaaatacattcaggaagagaaaactcccttcccgcttgtacacccctattataaaccaaagtttttccaataacaactgcttccttacactttatctttcccgtacttctcccctttatcattcttaaacagtggtgtttaaacagcaatgcttatgcaactcttcctgctgcctcctgatatgctctcaactttctccttgcatcttcactcagattccgcggcacctgtatttgaattgtcacatactgatctccttttccggatggctgccccatatgtgcgattccctttccggccagtctcacttttgttccggattgtgttccttccttgatcttgcagcttacctttccgtaaagtgtaggcacaatcacctcaccgcccaacaccgctgttgtatatggaatctgaatggtcgtgtagacatcgtctcccttccgttcataaccgactttgtcttttactgaaatttccagaaacagatctccggcttcccctccgttcatcccgtcctgtccctttcctttcagccggattttcttgccggaagaaattcccgccggaatgtgtactttcagagactgtgcacgtccacttgcgtctgtataagagatgaccttatctcctccaaatgctgcttcctcaaaagtcacctctaattttgcagtgacatctgcacctttcctgcgataaccgcgcggtccagttccacttccccttgctctctgaaaagaacttccaaaaatgtcatcaaaaaaatcatccatatttccgccttcaaaatgaaattcctggtagcttccgtccggacttcgatagaacttcgcccctttaggttctccgtacgactgataggcgcccggatctgctcccatacttccatcaaaggctgctgttccaaatcgatcgtacaactttcgtttctcttcatcgtgcaggatctcgtaagcttcggtcacttctttaaatttctcatttgcaacagaattctcctgattggtatccggatgatacttttttgccagttttcggtatgccttcttgatcgcattcgcgtctgcatttctgtccactccgagaatcttgtaataatccttatttgccgccataactatttctcccctttcctactacaatttttatgcaagattaaaaattttctgcgaaataaaaacgggactgcatgtcacagtctgtaatcatgcagtcccaaatctatatagagtgtgtctgaaaatctatcactgctttcttgatccgtaacaaaaagttcttccccatacacacctaccagcactatccttcgatggcaatatatttcttctcctcagcttctactttcttctgatccttcttcgggattgcaagaacaagtataccattttcatattttgccttaatgtcttcctgagtgatatcctttcctacatagaaacttctgctgcaagatccggaatatctttctcttcggatataattgcctgtcttctcatccttctgatcgttgttcttcgtcgtcgccgcctggatggtcagataaccatcttttaattctgcgtgaatgtcttctttcttatatcccggaaggcttacttccaattcgtagccatgttcatgctccttaatgtctgtcttcatcaaagactctgtgttcgctctctggtaacctctgaatgggtaatcaaaatcaaagaaatcatcaaacaaattctctccaaaaatactaggcatcatcataaatcatctctccttttccattaaaatcttattgataaatgtcatttattggaaccggtgatgtggggactatttagatcttctcatcctttcttcgtcctcctcctttgttctagttgtaatataacacttatattagcactcgtcaagagggagtgctaaaaaaattgtgaacattttatgtcctgccagtattcctgtcctatgaccgtttcatccctcccctttatcaaaaactattctctgagtctataacttttatactaacatcttttattatattatcatccatgacaatgtgaatcacgctctctcccaacagctcaccagctttgacaactaacaaaagtttcccatgataggttttccaacaatgactatcataagatgttgttgtctggggatctgcatttccaacagcaagaatccggacatttccttcagctactactttaatttctttctcctctgtcaacacttctaagccatctttatctacgaggctcaactgaataaaagcaagttcctccgtaccttttatcattacttcctgagaaacatctactttcactcccctggcagtccctgctgtttttaattgacaggaactgctttctttcccttggttataacttatggcagtaacttctccaggttcatacttgcattcaaaggtacttacatatccaactttttctcctgctggttttttcccaagcgattttccatttatgaataattctacctcttcatctgctgaatatacatctaccattgcagactttccttcatatccttcccatgtccaggaagcaatattatctttcagcatccaaggtgtctttgaatgcttcattccagaacggtcaacccgttccaccgcaatatatggttcttttcgcattccatatacaatttcgcgcaaataactaatcggtcttctgtatcctgtcagatcaatgtctccaatatatgcaagtcgatccgggaaataacttccaaaattagttttctcatcataatagaaaatgccacatcctgcttctcctagataatcatagcccgaccatgtaaaatctcctagtacttgatttgatttttttacaacagaccaaagtcttgcaatatctgctggaaatgtttctgtcccaagaacacatttatttggatacaattctgtatccaacagatgtctgcctgtcaaataatttaatcctataatatccatcgcttcacaactttcctgcaggacttctgtcataagcggatgttttgcaaaggcatcaccgacttctccctccatcaattgcataaaactattaatcgcgttgcttcctgaggaatcatttgtctcactattttctgcatcttttttaaataatggcgctaaatcttgcataatcggatacatttttgctccggctgcattcaggccattgattccatttgtagtatatctcgttctgtctttttcttttatataattacagatagtacggttaatttctgcaccacgctctgttcccacttcctgaatttcatttccgatggaatacataataactgatggatggttataatctttttggatcattttatctacaatatttttccactcatttaaaaatgagaatgcataatcatggtcatttttatgaatggtccacatgtcacataattcatccataactaaaatcccatacctgtcacatgcatcaagaaaatcttttgctgcaggatgatgtgcgctgcgtacactattaaatccagcttgcttcagcaatttacatttccgatattctgcttctctatatgtcgccgcaccaagaatcccattatcgtgatgaacgcaagttccacgtagtttcacagactcaccatttattcgaagaccatacaccgaatccaaagtgatccggcgaatcccatacagaaactcattggtatcccatacttttttctcagagaatatactcacttgacatttatacaaatgcggagtgtcacagttccataatttaggatttttaattacaatctcttgacgaatttgattttccgaatttccaaaggctgttaaatgcgtcactcctcggattacatttccatcttcatcactcatttctatctgtacttgaagtttttccttttttcttgtctgattcacaacagtagtcacaaattctaccactgcaaagtctttctccacatttatcgttgtagcatgcactccgtccactggtatttgtatgagttctccaacaaacagattcacattcctgtaaattccgcttcctgtataccatctactattttgctccgccgaattatctgctactacttttaattcattttcctgcccatattgtaaatatcggtccagtgaagcataaaaattagaatatccatatgaattcgttgttatcagtgcaccattcaaatacaccattgctttttcataaacaccttcaaattctaacgttaccgttttatccttccactcttccggggcaacaaatgttttaaaataagtatatattcctcctggataaaaacctgtagctccaccattttttgttgtctcacaaggagtctcatgaatcatggcatcgtgcggaagtgagatatcatctgcttcctttccgtacattttcaatgtcattagtgacggtatacaaccttttacaaatttccagttttggttaaaattacttttcaacattatgtttttcatcccattctttatttgctttttctactttcagcatacttaaaataattgtaataatcactccgaatacaaccggaagtgtaatatacatatgaaagatcatattaattgcgctctgagattgtactgttgccgttccaacatatcctcctatgttcaaaagccagccgactgctgctgtaccaattccaccgccaacttttaccccaagagaagaacagctaaacatggttccatccatatgtactttttttgttctataagtatatccgctaatttctgcgatcaatgcgtttaatgttccgctaagagttcctgcaaaaacacctttcataaacattaccaataagagcataggtacatttctttttactgcaaaataaacaaagaacacactcaaaactgtattgatcacatatccccaaaaatttaccttctgcatacttcctgccttttttacaagcataggtgtaaatgctaatgcaataattacaggaaacattttcatcatagaaaaggaacctaataaagaggcatctcccaacacatatgtagtaaaatatatcccgctgcccgttgtcaatccactcattgtataatatacgatatacaaaacaagaatcataatataatacttatttgcaaataaaattttgattgtatccacaaaacttaatttatcatctttttgtcctgcttcttcctgtatttctgtgttttcttcatccggaacttcttttactgccagacagctgatcgtatttacaaccagaccaatcactgcacaaataaaagcaaccactctccatccttttgctccgccaccaaaatgtgcaactgcacctgttaccgcaaaccccatcacaatattagtaacaactgcaaacataaaacgaatagatcctaattgtactcgttctgtagagttttttgtgattaatgcagataatgttgaatatgcaattccatttgcagtatagaaaatagcatttaaacttgtgtaaaatacaaagaaatatgcatattgcgctgtttctccaatatcaggcactgaaaacaataataatagacatagcgatactccaatttgagcatatagcatccatggacgagcttttcccagtttgctttttgttttatcaatcattctcccaaaaaatacatctgtaactccatccaatacctttgaaacaagcatcaatgttcctataattccagtattcattcccattgtgtctgataaatataacaataagaaactagataccaatccataactacagtttgatgctagatcccctgcaccatatgcaagtttctgataccacttcaaatattttttctctctcataattccctccatcatatactcgtatttgttacattttttctcctcattcgaatgaatacataattgcagcacatgtcaaaatgtactataatctaactagcatagtattatattattataaatcttcttttatcacaatgttaaaaaaagacctacaagcaatcaaattgtatcatattcacgaataaatggaggcttttatgagtaatagcagaaaatccttggaggaattccgttccaaatttttgaaagttcataactttcacagtaatttcagtcagtattatcacatagatacaccattcagtgttgtacttgaagtctatcgatctgatttagaaaacaaatactttaagattgctaatttctccccaaatgatttttctgagattttaattgatgatgaatctcttttatcctcaatggcaaaacgccctcttcaccaacatgatttttttgaattcatgtttgtccaacaaggtgaggtcatttttaaaatagaaaatactgagcgcatctatccagcgggaaccggatgtattgtaaattgtaatcttcgacatttagaaaaaatgtcatctgactttcgtattttctttttaaacctttcaaaaaattatgtaaaacaactgcttgattccatctccggtttatactttgacattgaaaataacacttctttgcatacactttttcattttttatataaaaatgcctctaccgaagagaatactaaaaaagaataccttgattttttccctgtatataataatagtgattcttacaaggtaatatataatttagaagaaaaaattacaaaaactcttcttgcgccagttgccggagattcattttttattaacggtttcatatttcaactatttgatcacctatcaaatagtgaactatatcatactacaactgtcgatattgattacaacaacgactttttaatttttacaaaattgacccatcttttagaagattctaaccaacaactatcacgccatgaactttccaaactgctaaactatagcggagactacttaaatcgtatttccaaaaaatatagcggtatgacgctctttgaatattcgatgacttttatcatacgaaaggcagaatactatctcctcaaaacagattattctatttcacatattatttctattttaggctttacaaaccgaacacatttttatcatattttttattcaaagcatcacatgacaccgaaagaatatcgattaaaatattgggataattcttatcaaaataattaaaaaatcccctgcaaacatctcttacaatgtatgcaggggacataactaaaagctagctttctacttttccctaaatcggttcaaaatccgcaactccatgcttgcacagtggacaaatataatcatccggaagttcctctccttcatagatatatccacataccacacatacgaatcctttctttccttctgtctgcggttttggttttacatgtttctgatagtaagtgtatgtcatcgtttctttatcattcatcacacgagcctctgtcacggtacagataaacattccgtgtgtatctagatccacatactgctccactttcaatgcaaggaaggcattgatatattttggaaggaaggcaacaccattgtctgcacgcaacatattccatccttcgaatttatctgcttctcttccgctctggaatccaaatctttcaaacactttaaacggtgcttccacagagagacagttgacattcatcacgccagtcttcttgatgatatcatgcgaataattcgccttattgatattgactgccacacggttcggattgtctgtcagctgtgtaacagtgttgacgatcagtccgttatccttctcaccatctcttgaagtcacaacatacagtccatatccaagacggaacagcgctgtcagatcatttttattcgctttgtcatctgactgggcaatatattcctgacataactcgtctgccatctgatctaactcttccagattctcttcgctcagagaggacatgatcttcactgaatttttcatccatgtaatatcctggctgtcctcaaacattcccttcataactcttgctgccgtcggtgcccagcttccgttctcaatgaatccgatcgtgcgcttctggtaattgcgcgcggtcagatgctcaataaaaattttcataaacgggaaaatatctgcattatatgtcgttgtcgccagtactaattttccatagctgaatgcattttccactgctcttgccatatctgcgcgtgcaaggtcacagacatacacatccggacatcctttttcttctaatttcgcagccaaagtttctgctgctttctttgtatttccgtagaccgatgtgtaagcgatcatcacaccttctttttccactgcataagaagaccagatatcatatttctcgatataatgtccaagattctcctttaaaatcggtccgtgcagcggacagatcatctggatatccagtgtcgctgccacttttaagaggttttgtacctgtgtaccatattttccgacgattccgatataataacggcgagcttcgtcatcccaatcttcctccacatcatttgccccgaatttaccaaatccatctgcagagaacagtactttttctgtactgtcgtaagtaaccataacttccggccagtgtaccatcggagcgaacacaaatgtcagatcatgctttccaagtgacaatgtctgtccgttttctacttccaatgttcttccttccagatccatctccctgaaaaagttggccatcatcacaaatgtcttctcatttgccacgatcgttgtatctggatataccttcataaaattataaatattcgcagaatgatccggttccatatgctgcacgatcaagtaatccggctttgctccatccagcacctgtgcaatatttgccagccattcttccgcaaaattcacatccacagtatccattacagcgattttctcatctttgatcacataagagttgtaagacattccatttggcacaacatactgcccttcaaacaaatctacctgatgatcattaaccccaacgtaaatgatatcatttgtcaccttcattttgtattcctcctgattttttgaaatactgacttcgcagtctgattcttttcttacatttgattttctctcacagatttctctctgtttcagagattgtgaaatttttatctttatgcctattataactagaatcggataagaacacaattctttttttataaaatttctgagtcccctccttccgctttcttcttcacatagtactgtgcctgtgcctcgtaaagcgcaaaatatttccctttcttttccatcaatgtttgatgatttccgctctctgcaacagttccttcttccagaacaacaattgtgtcacagaacttgcagctactcatccggtgggagatatagatggccgtttttccattgatcagttcgttgaaattctcatagatttccgattctgccaccggatctaacgctgcagtcggttcatcgaggatcacaaacggagcatctttataaagcgctcttgcgatcgcaaccttctgcgcctccccgccggagagcgcctcgccatccccggtttcgtgatagagcagcgtgtgaatcccatctttcatcttcttcactctttcttccagcccgacctgacggatcaccttccatactctcttttcatccactttctcggagcctgcgatattttcatccaatggaaaatgatacagtctgaagtcctgaaagacaaccgcgaaaatctttatatattcctcataatcatatttcccgatctcaatcccatttaaagtgatctttccctcagacggctcatagaaacgaagcagcagtttgatcaatgtcgtttttcctgcaccattcatcccgacaagcgccatcgtctcccctactttgaattttaaacttacatcctttaaaatatacgtctctgtccccggataacaaaaagaaacatggtcaaactccaactcatactgattatcgtctcttttttcaatcggcagtgtccctacataatgcatattcgggagatgaataaattcctcataagatttcagatactcattggaataatcaatctcaatatgtgctcccatcatttcacggatactgttcatcatcgttatgatcgcacccgcatacatcagcacttccccggcggaaacacttcctgcgattgcctttattgcaatatatacataagtgatgcctgccaggatctgaagcgcaaaagcgacagcgccatttccacgtccggaaactttcgctcttctctggaacagtgccatacacttctttatcacatctccttgaaatttatttatcagatattctttgagctgaaacagacggatatcctgcgcaaactgctctgaaacaatcaggttgactagatagtcaaataatgcatttgacttttcatttgcatgcatagtgattactgtttcctttccgatccgttcgtaaaccttatctcctaaccacaatacaaatacaaaaccagcgatcatcacccccgtactgatcagaaaccgaaagatactttccttctcccagtctgactgcagcagcagaagcacgacaaatccactggcaaaaacaacttccgtgcagcaggtaaaatacttataaatttccatacactgttcggagattcctccatgtccgcgctctgcctgccgtactcttcgaaacttctgaatcgtctcctgtttctcaatttcttcgtattccatggaaaatgctttttttgcagtacgctttttcgtctcctcctcgctcggttccgcatagtgcgaaaagatctgttccgctgcctttgagatcaatgatacaatcatcaccgtcacaacaagaatcacgacaaaagttgctgcctgctgatacttctcctccagaagaacatcgagaatcttcgcatacagaaaactgttaatatagacaaccgatgcacccgagagcattccaagtacaaggatcaccggcaaaatccgatagcctttcgcctgaaaaagacaaaatttccacatttcttttacagacatctgttttctcttattcatgtgcctcttcctcctgataatatttcccctgaagttcaaaaagggaagcgtatgtccctcccattttcatcaatgtttcatgggttccgcgctcaatgatctcccctttgtcgagcagaagaatctcatcgcagaaccgtgtcgatgccagccggtgggaaataaagattgtacttgttccttccagcgtcttctggtaagtatcataaatatttttttctgcaagtgcatccagcgctgcagtcggttcatctaaaagtaacagtttcgggctgtgatacagcgcccttgctagaagaagcttctgaatctgtccacccgagagcataatcccatcttccgatacatcctttccaaaataggtgtgtagtccgtccggaaggctgctgatcttctctgccactcctgccttttccagcacattccataacctttcctcatcccattctcctgagagcgtcacattttccccaactgtatacgacatgataaacggattctggaaaattgcagcaacatggtgcatgtaggctttacgatccagttccctcgtgtcgatcccattaacatagactgctccgtttgtaggaagatatagaccggagatcagttttacaatcgtagattttccggccccgtttaatccgacaagtgcaagccgctctccttgatggatggtaaaggaaacatcctttagcacctcttcctctgccccctcatagcgataggatacatgatcaaacgtaatgtccagactggaaaattggttttccgggatccgcctttctcctcctgatccgctctcaagttctaaaaaatctctaagatcatccacctgctgcccgcaccgcttcatcacaacaaagttgcttgtgatctctgtaaaccatttggcaaacccactgatcaatccaatataaaacacaaacatgcttgacgaaagcccctgtttcaaaagatagatcagataaaaataacagataaaatctctgactgctgccaggatcacttctgtaaagtccgagaagaagcaggccgcattataaagcgccctatattttcttcgctgtctgatcgccgaatcatattttccgatcagccagtcggaaagtccgaagacgcggatatcctttccgcctgcaatatcatccacaagccgatcaatatatccctctatcctctgatatccagcaagtttttctttgaccctctcatacacttttacagaaactttggacgttgcgacagtgatcagtgacagaccgacaaggagcagcaagatgcgtatatccatacttcccacgatcattgcatatgtgaccagccctagtacatttgtaaaaaacattccaaaacgctgcatcatgccttgcactccattggaatcgtttccactcaatgcgatcagcgacctctccatcatctgacggatttcactgctttctgactgttctagagaaatctccaatattttttcgagaacagaatagaagtgtcctcccatcctcatttcgatgtattctacggatataatattctgcagataagtatcaatccaactaatcgccccgtatacaagaaagatggtcatgaccgccccgatcaacagcataagcgggctttccttccccagcatcgatacgataagtgcatttgctcctacccccagtaacagaagaagaacatatgtgactgcctgaatcccgatgtgcaccagataaaccggagttttcttcatagccggtgcaaagcagaaaatcaggttgcttaaaatgctccttttcttttgcttttgtttcttctcttcctccatctataaagcctcctctcttttcttgcattcttaacttatcacatttgttctcaaaatagaaaaaacatgcacgaattgtaaaaatccgtgcatgaattgcaaattttctctataatggcagcatgatctcggtgacgaacacccctggttcattctttcgattgatataaccgtcatatttcttcacaacattgttaatccgtttaagcccatgaccgtgatcaccgcgctttttagaaatatattcttcatcgagttttcgcacaacctcgctggtggcattggtcactgtaatatacaactgctgcttcagcggtgcaatataaagtcggagaaactgttcttccttcttcaccgtccgacatgcttcgactgcattgtcgatcagattcccgatcacaacacacaaatcaatgtccgacacagacaactctttggggatcaccgccttatagtcacaccggattccattttccagcgcaagtgaaatcttcgcatttaagatcgcatctacattgagatttccggtatcaaacaacaggcggatatccgcaagatcttcctccagccggtttaagtattcctttgcctcagtgatattatctttcgcaagatatgcctttaccgactgcatatgattatgataatcatgccgccaacctcgcatcgtcatatagatgctccgcacttcatccatctcctgagacaaaattttgttctgataatcaatcagcgccttctcatactgccgctgcatgattgcccggatcacgaaaccgatgatcacaagcaggagcagcattgccactgcagccagccctatgatttccattctcatctgtaatactccttatagattttcctgaataaatgcctgattaagctgttggtacattccccggctcaccggaacctcgatctcgcctgtaagaacacagctctgcctgccaatccggctcaccttcgataaatttacagcagtacttctatgacatttcacaaaaggaggaatgcccccgtcctttgtatctctgttcagatgatttaaaacttccccgaaactctctttgactgtcaactgtctgtccttgcaatacactgtggtgtagtgaccatccactgcaacatacaaaatctgcccctgctccaccttgatattctcccctgccacttccaaaagaacatatggctcttctctgtctgcaagttctgtcacaagtatgtccaacatttcatacagcttctgttcccttactggtttcatcatatatctccaggcttcaatctcatagccatcaaatacatgacttggatctgatgtcaaaaaaacaatgcgaatattcatatccgttttccgaatctgttttgcaagtgtgaatccatccatcccgatcatcgaaatatcaagaagaagcagatcatagggtacgagttcttctccatccaactcaaatagaaattgttctgcactggaaaatacatcgacgatacacttctgcccgcgctcctttgcccagctttttatcatatcctctgtcagcaccgcctgcgcgcgctcatcttcacaatatgcaatccgcactgtcttctctccccttattctttctgtctgatgctctgcctttccggtcagaattttacagactcctcttgccgttcttgcatctaacttcttatttctccgtctctgcctctacaaacttcgcatgatcagcaacccatgtcatagctgtatctaagagaatgctctcttttaacttctcttctccgtcctcaccatttgcctcaataaatgcatctccgttttcgtatccgtaggactgtgcatattcgtcatatttttccttatacgctttgtcggaaagctctaatttttctttctcggcgatcagcttgcttgcatacttgctctttaactgatcttttgcctgcttttccatcttctctacaaactgatcttctgtgattccagattgttccaggaattcctcaaatgtaacctgatagtacatctctgcaagctgtgtatactgctttttcatcagatctacactctcattgatatcttttttaaactcttttttcagctctgtattcttgactacttctgtccatgcactgtttttgttctgagactctaccgtttttttattagatgtctccagatctttttttacttgttttttgtactcgtcgacagtctttgccttgtcagaaattttctgtacaaattcatcgttcagctctggcaggatttcctctgtaatggagttgatcgttacggtaaacactgcatctttccctgcgatttccgctggataattctccggcaatgtaagagaaatatcaaatgtctcattcagcttatgcccttccattccttctgaaaatccttccacaaatccttcgcctccgacttctaccgtaaggtctccctgatcaaatgtctccccatctgcttttccaacgtaagaaacttccagagaatctcctttctttgtcgcccggtctgtcacctctttatgttcagcttccgcttccaatgtgctctggatgctgttttctacatctttatctgtcaccttcgccagttccagtccttctactttaatccctttatactcactgatctttacattatcgtcctcaatggatttctgacatcctgccagtgttactgtcatacacactccgagaagaagcgccgctaatttctttttcatcttcctacctcattattctttcattttccagctgtcatctcacattttgactgctctttcagttatatcacacttccaaacagaaagaaaggtgttttgccagatttcacacttcttttagaatcctctttcttcttataaaagtggggacagcaggcgggaaaactgctcttttccacggatgagaagattccgctcttcgtaaagacgttttgtcaccaacgtagaatttagaatatcctgttcaaaagcttcctccagtttttttgtcgtctcctcactgtagattacggcattgacttcaaagttcagttcaaaactccgaatgtccatattggctgtcccaaaacagcttacaaggccatcgaccgtcagtcctttgacatggagaaaaccgttgttatacacatagcattttgccccagcctcgatcatatccccaaggtacgaatacgatgcccagtaaacaaacggatgatccggtttacacggaatcatgattcgcacatctactcccgatttcaccgcaatccgaagcgcttccaaaatacagtcgtccggcacgaagtatggcgtctgcaaataaatatgatggcgcgccttatggatcagcctcatatagttgtcacggatctcttcacttttggaatccggtccactggaaataatctgtaccggctctcttccatttcttacatactctggaatttcaaacaactcatcccgcaaaaacagattgtctctggccgcatagttccagtccatcacaaagcgcaccgcaagggaagtaaccgctgatccttcgatgcaaagatgggtatctctccagtatccgaatttttcgctcagcccaatatattcttttcctatattgaatcctccgacaaacccaactcttccatcgatgaccgcaatcttcctatgattccgataattgacacgcaaatgtagcttcccgagcagcgccgggaaaaactctgccgtctgaattccatttgcattcagctcctcccagtcttttttcttcatatcacgacatcccatactgtcaaacaggatgcgtacttccacgccttccttggcctttttgatcagttctctgctgatcgcctgccacagctcatcctttcggataatataatattgcagatggatatatgtctttgcggcgcggatttctcgtatcagagccgcgaatttctctctgccgtccgtataaatctgtacatcattattccctgtcaacaccgcactggccgcttccagattgtaatagatcagattctcaaatcgttccatctttggattggacagacgaaactgcttccgacggatactcttctcctgccgtctgactgcataatttacttctccctcaatttccttcattttaaacattctgctctttcggaaatcttgtccgatcagcagatacaatacaaatccaacaattggtataaaatatagtacgagcagccatgtccagacagtctgcggctttcttctctgaaagaagataatcacaaacgaaagaagaatattgatcaaaacaagatgctccatcatccagccagttcctgtacaaagatcattccaaatatttcctaacattccctcacctcacttttgtatttttcacctttttctcattccctattatactcatttttccacagaaaagtaaggtgcagcgctcaaatcgcttgcacttcctaagaaacaatgctacaatactatttgtctaaaaatgtatttttactatatactaggaggtctatcgtgagtttaccagtaattatattacttatcgttttagccgtactgatcatcggcacgatcgtattgtacttcttgggaaaaaaagcggaaaagaaacaggcagaacaacagcagcagttagatgctatggctcaaaatgtaacgatgcttatcattgataagaagcatatgaaactaaaagaagccggttttcctgccatcgtactggagagtacaccgaaatatttgcgcagagccaaagttccggttgtaaaagcaaagatcggtccaaaagtaatgactctgatgtgcgacgagaaaattttcccattgatcccggtcaaaaaggaagtcaaagcagttctcagcggtatctatatcacagatgtcaaaggacttcgcggaaaattagaaatgcctgaaaagaaaaaaggcttcttcgcaagattcaaaaagaacaaagacgaacaaaacgataacaaaaagagtaaagaatctacaaagaaaaataaataatctaatacattcctacaggaagataactttcatggaaatgtctggagattacagaaacctccaaaatgatgccagttaatacacatcattttggaggtttcctttactcttccctcagattttcaacactttcctttctcattcttctttagaaatccatattttttgtaatctgaaagtctcctgcatctttagactttacattgattcggatctgacagtctgccaatggctcatgattgacatccaatatatatccgacctttacattgatattatcctctgacacttccacttccatttcttttgtatggatgccgattagaagctgtccatacggtgtctggtagtatgtgaggttctttttattcttctcaaataccatgtgcacatttgatacaccgctcttcatcacttccaaagcgtcctctccggtaatctttattcgattttttgtaatgcccggtatgccctctgtaacttcatcgaataaaatgtaatgttttccatttttgaggaaatagttagcaggagcaacgacttcaataggttcatactctttttcctcctccagtacgtccatctgcagtcccgaaatacttattaatacgtcttttgtcatactctcacctgtactttttgtctgtcatctctcatattgttgcattctaatattcttcaatattgatctgctttgtcgtctcaatatcatacggcaaaatagaattggcaaactgcttgaacttatctgccgcatcactgacatagaaggaatactctccatgttcttcctggtcattcaccggagtgtctctgagcatctcttcttcctccagaagccgcttaagatccattgcagtctcatatgccggattcacaagatgaatcttttctcccatatattcccggatcgttgagcgtaagagtgggtaatgtgtgcagccaagaatcagtgtatcaatatcagattctctcatatctgacagatagatatcaatgacttcccgggtaatcttatgttttgcaaatccttcttccacaagtggcacaaacaggggacatgctcttccggatacactgatctgagggtcctctgcctgtatcagttttttataaatctcactttttaccgtcgcctctgtaccgatcactccgatttttttattgatcgtctcttcccttgccgccctcgctcccggtgcaacaacaccgatgatcgggatcttaaattctttccgcaccgcatccagagcaagcgcactcgctgtattgcaggcaatcacaatcgccttcacttccttcgtcagcaggaagcggataatctgacgggaatagcggataattgtagtttccgacttgcttccataaggtactctcgcagtatctccgaaatacacaatactctcattaggaagctgccgcataatctcccttgccactgtaagtcctccgactccggagtcaaatacgccgatcggcatatctttcttattctctatcttcacaacatttctccttctatctgccatatctgttctctattgtacccgcttatcaggcagatttcaagggcatgttccctttactcaaaatcccggtccaatgagaagcaaaaaaagaacattttcaatcatcccccgtcactggatgcccgtccgaattgaaaatgttctttcttcctttgtcagtcagagaaagccatctactctgccgtcctcacagacagattgtttctcttataaaatcactaaattgccagttttttcgcaacctcaagctgatactctggaagtttcttttccatgttcagcgcttcatcaatatccacatcaatatattcaccatgcttgtatcctaccacacggttcgtctttccttcgcagagaagttctactgcctttgcacccataatggaagcatacactctgtcctttgctgttgggcttccaccgcgctgcatgtgtccaaggatcgtcgctcttgtctccattccagttgcttcttcgattctctttgccatgttgatggaatctccgacaccttctgcattgatgataatataatgtttctttccacggtctctgttatcaataattctcttgataatttctgactcatcgtaattgtgctcttctggaagaaggatctcctctgcaccgttggcgattccacaccacaatgccagataccctgcatctcttcccataacctctacaatactgcagcgctgatgagaagtcgaagtatcacgcactttatcaattgcttccattgcggtattcaccgctgtatcaaaaccgatcgtatactctgtacaatcaatatccaaatcgattgttcccgggattccgattgtattgattccgagctttgcaagcttctgtgctccggcaaaagaaccgtctccaccaatgacaacaagcccttcaattccgtatttcttacagattgcagcagccttctgctgtccttcttctgtacgcatttccttacatctggcagtctggagaatcgtacctccgcgctgaattgtatcagatacgtctcttgctgaaagatcgatgatctcctcttccatcagtccctgatatcctcttctgatccctcttactctaagtcctttccccaaagctgttctgactacggaacggattgccgcattcattcccggagcatctccaccacttgtcaggacaccgattgtacgtatacgctttgccatgatattacctccatttacctatacctaaatattattatttatatattttgtgattattttaacatacttaaaatttgttttcaatgcatttttcgacaactttcacacgttcttccccataataatttgtcagtctgctcaaaatattcggttcaatcccaatgttccagttacgcggaagacgttttaccgctttctctgccttacaataaattacaactgtgtcatctccttcagaatcctggagcatgcccatcaaaagcttttcttccgcaagataactatttttgtctgcaaactgaatccaaagttctctctttacttgatgaaatgggatgattttctcacaaatcagtttgctaggacggtcatcttcctcagaaactcttcctttgacaaacaccttcttatcttcttccaagtattgtctgttcgcctcataatctctcgggaacacgacaacttccaccgttccgagcagatcttccacggtaataaatgccatcatttgatttgtcttcgtatgcttgatcgtcttcccaacgatcatgcccccgatgatttctttcgcaccgtcatgcacttttgtccggtttgtctcctcatcaagctgaaagtccagtgtagttgccgacacacttttcttccactgctcttcataggcatctaatggatgcccgctgatataaacaccaagcacctccttctcaaatgcaagaagcgtctctttttcatattccccaacatctgggagctggatctcaaattctttcttctgatcttcgtcgacaaaatcaaacagtgacatctgcccgctcatcgaaaatttcttttcctgattgacattgtctacaatctgaatatagatcatcataaactgctttcttgtcccgccaagattgtctagcgcccctgctttgataaagttttcaatacttcttttatttaacatttcttttaaggaaatacgttcaataaaatctttcagtccccggtacaatccattttcttcccgttcacttacaattgcttcaatgaccggcttcccgatacttttgatcgccgccagtccatagcggatatttccctcatctaccgagaatccactgactccgcggttgatatccggcggaaggattttgatgcccatctgccttgccgcataaatatattctgatacctttgtcggattttcaatcacagatgtcatcagcgctgccataaactcaatgggatagtaatatttcaaataggctgtctgataagaaacaactgcatatgctgcggcatgagatttattgaacgcatattttgcaaaatcaatcatttcatcataaatcttattcgctgtcttttcatcaattccattgttcagacatcccggaactccttcatcaatattgccataaacaaaactctggcgctccctctccatgacatccgcctttttctttgacatcgcccttcgcaaaaggtcacttcgtccaagtgtatatccggcaagatcacgcacaatctgcataacctgttcctggtaaacgatacatccatatgtcggtgcaaggattggctccagctgtgggcaatcataggtgatagatcctttgtcattctttcctttgatgtactgtggaatgaaatccatcggccccggccggtacagcgaaataccggcaatgatatcttccagactctgcggctttaactctttcataaagtttttcattccggcgctctccaactgaaatacaccgtcagtcttcccggttccgatggaatccaataccagtttgtcgttgtagtcaatctcccccatatccaacttgactccagtcgcctgctccaccaggttgacggcattctgaattacggtcagagttctcaagcccaggaaatccattttcaaaagaccaagttcttccagtgtcgtcatcgtaaactgtgtcgtgatcgaaccgtccgatgctctggaaagcggcacatattcgtctaccgacttctgactgatcacgactccggcagcatgcatcgacgtatgccgtggaagcccttcgagacgtttggacatgtcgatcaaatattttacttgttcgtctgtctcatacattttccggaactccggattcattttcaatgctttatcaatcgtgatatttagctctgtcggaatcatctttgcgatcgtatcgacaaatgcatacggcagatccatcacacgtcctacatcgcggatcacacctcttgccgccattgtaccgaatgttacaatctgcacaacacggtctttcccatattttctcacaacataatcgatgacttcctgacgccgttcaaaacaaaaatcaatatcgatatccggcatggacacacgctcaggatttaagaaacgttcaaacagaagctgatagcggatcggatcaatattcgtgatcccaagacagtacgagacaatacttcccgccgccgaacctcgccccggccctacactgatatcattgtccctcgcatatttgatgaaatcccatacgatcaggaagtaatccacatatcccatatttttgatcgtactcaattcataggaaagacgttcttttaattcttctcccggatttggataccggcgttctaacccttcaaaacagagttgattcagatattcccatgaagtcattccccctggcacatcgtattttggaagtttcgtcactccaaattcaatctccacatgacatctatctgcaatcttctgcgtattttccagcgcctgccttgcatatgggaataattcgatcatctcctgctctgacttgacataatactgtccgcctgcatagcgcatccggttttcatctgtcagctttttcccggtctgaatacacagcagaatgtcatgcggtttctcatcctccgcataagtatagtggacgtcattggtcgccacaagctcgatcccggtctctgccgccagccgaatcagacgctgattgacatctgcctgctcggtcagcccatgatcctgaagctccagaaagaaattcccctttccgaaaatagattcatatctcagtgctgcctgtttcgcttcctcgaacattccccgaagaagatttttctgtacttcccctgcaagacaagcactcagtgcaatgattccttcatggtactcttctaacaattcgatatcaattcttggcttgtaataatatccttccacaaaccctttggaaacaatcttcatcagattctgatatccctgattattttctgccaacaataccagatggtaatagcggtcctccccgccattgatctcatggtcaaaacgtgacccgggagccacatacacctcacagccaagaatgggattgatgcctgcagccttagccgcccggtaaaaatcaatcacaccaaacatgacaccgtgatcggtgatcgcagcactgttcatccccagctcttttaccctggcaacgtactctttgattttatttgatccatccagaagactatactctgtatggacatgcaaatgtgcaaaactcatagatgttgctgatttcctccttttcttctcttcctgtcaatatccgaaacagtgaaagtaccatttccttctgaatcggtccgacagatttttattactcaaatatttattacaatgattctaaaatctacgaatccagtatatcatcattgaaactcgccgtcattccttttctaatagaaaaatcctgcccctcaaaatgaagagcaggattttcctcccaaaaccttttcaatttcttctcgttccggcatcactcgcagagcgccttttttcgtcgtgatcaatgcagctgctgcattggcaaactgtagcatttcccttaccctttctttgtcttgcttctgtataccatatcttaatatgtagtccagaaggcaagcgcaaaatgtatctcccgctccagttgtatcgattgtgtcctccatcaaaaaggcttctgcttctacaatctcactgccaaaaaatgctttgcttccctgatttcccatcgttgcacagacaaaaggaatctgatatttctctatcagtttttgtactccgcgatcaatgtctgtttctcctgtcataaatgtgatctcattgtcagagatttttaacacatcgcactgactcatcccaaatgcaatcttttcttttgcctcatctaaatgattccaaagtgccggacgcaaattaggatcaaaagagattatcgcaccattttgttttgctgtccaaatggcatattttgtcgcttcttctgcctcggacgatgtcatagaaaggcttccaaaatgaaaaagttttgtctcttttaaaagtgcttccccaacttcttcttttcgaagcatcatatccgcaccgggattccgataaaacgaaaacgtacgctctccatctgctgcattatgtacaaaagccaatgtcgttgggattttctcatcatagcagattccctctgctgaaattccctgttcttttactaccgacaccaacatttctccaaaagagtctttccctacttttccaataaatgcggtatttctccccagtttctgaagcattgcaagtacattgcatggcgctcctccaggatttgcctcataaatctgattaccctgaccgctgattcctgcactggtaaaatctaccagaagttctcctaatgctactacatccattgccttcctcctgctctttaaatcagttcatgtttttccacgttgatttttactattccatcacaacaaaatacaatctcttctgcttccatcggcgtacagattgctgtggtagacacttgctccccatcgttaataaataattcaatagactgtctgtccataataaaacgaagttttaaaggttctttttgttctggaagtttccacgcacgctgacatacgatgtcccttgtcacaccgcagtatgttcggttcacttccattatctgtttttttctataataagtataactggtcgtatattcttgattgtgtgccagttcgatgcaaaattcatcgaagactccttcgcagatttccactgtcagatccaaaatccgccctttcacttcatcaaattgcaccgtaccagatacttcctgattctctaaacgacaggaattttttcggtagtttttcaattcttctaccggtttctgatataactttccatttacataatgtaattctcttggaagtgtcatcattccctgccatttttgttcttccagaattacgcaggcatcccaggatttcatccacgcaatcaggattcttcttccatccggcagttctgtcgtctgcggtgcataaaagtctaatccataatccaatgttttcggcatctccttttggaatgtatgtgtgttttcatcgtaatctcccacaaaatatacagaattatttccattatgaaattcgtatttctgtgctttcatattctgcggcgaacagattagaaaatatttttcatccaatgcgaagaaatccggacattcccacatggtccccacttttccgtcactgttgtctgccagtatggtctcaaatttccactcttctaaatttttactggaaaaaagaacaacctgtcctttttgttctgcatttttattccctacgatgaggtaataggtatccccttttttccatactttaggatcacggaaatcaatccggctacagttctccggcatcagttctccagtcactaccggatttttggaagatttctcataagaaattccatctccatatgcaatgcattgattctgtcgctcttcttctcttccatcttccaacatttgtctgctcacacctgtgtagagaagcacatgtttcccatttgcttccagagcgcttcctgaaaaacatccaaatgcatcataattttcatccggagccaacgccacaggaagagtttcccatgaaatcatatcctctgagacactgtgtccccagtgcatcggtccccactctcgtgtataaggatgatactgataaaacagatgaattttcccatcataaaatgaaaatccatttgggtcattcatccagccaatcggtggtgtgatatgaaacaccggtttttcttcgaaagaaatctccttctgtttatttttttcatattctcgcgctttttctaatttttcactcacgctttgctcacctgtctttctattcattctttaaggattcctggtattgatcaaaatatttctgtttgatttttaaataatcggatagtccatactgctccatttttttcagataactatcccattcttcttcaattctgccatttaaaatccagtctgcttttttctgttctgcatacttcttgatgtcagtatcgtactgagatactttattcgtatctgcaatgctcataaatacatttgggtatacatacttgctgttcatgtcctccaagtatacttcatgcatattatcgagacgccattttgcatccgtaggctgtgtcacataactatcataatactcatttaatattgccagtggtccattgaccgactgtgcctctcggacttctaccggagactgctctccaaggtccatatgctttaacattttttcgccttgtgcattctcactcatctcaaaaatattaaaggaatctttttctccataggttccccagttattctgcggagactgtaacggagcatacatctgatcgatccaagcagccgccagtgcagtattccggcaacttgttgtcagtacacagcgccctctgtcaaacccgctcgtttcactgttattctgtcttgtaatgtttaccagtccttctgggcctgcgagcgctggcagcataacatagtcttcataattatcaatattagaaatatcccatgtgaagcaaagtccataacgatggctctttcctttcgctacataagtagaccactcttgtgtgaaagcttccggatcgaccaaatcctgctctaccagcccatgcagccattgaatgccttctttatatccttcctgcacagtagtatagatcacttttccttcatctgtcaccgcaaaatgatcccccgtgtccccatagccttctccgaatccattgattaagattcctggatcctgatctccattattgatgataaaagacattgggataacctctccctctatttcaaattcgctttccaaaagatctgcattatcccgaaaagcgatcagtacctgttctagttcttttgtcgtatctggtacttccagtcctaaaaaatccagccactttttattgatataaggaatgttgccaattgcctgaatcgcttcttttccctctccaagctgttcaatccacggaaaggaataaatatgtccatccggagctgtgcacattgttctgtattccggatactgttcaaataccgcctgcaaattaggcatgtatttgtcaatcaactcctccagaggaataatgattccttgttttgcatagcgtaaaagatcataatcattcatccccgcattgaaaagcccgtccggaagatttccaaattgagccaatgcaagatttttcttatccgcaaactgatctgccacaaaacaggtccagtcaatatgtacgttcgtctgtttctccagtcttttgaagatctctctttgatttggatcttgtgtagaagttgccggcgcattggtaataaatgacagttccgctttttcttttaatggaaatgctacttcttccactggtgtatccggattgatctctgcttccatcttctttccgtctccgcatcccacaacagaacatgcaagcaccaaagataatcctgctgcaattacggtattcttctttcttctcattctgctgcctcctaacctttcactgaaccaaccataataccctgatcaaaatatttttggaaaaatgggtacatgatcaataatggtaaacttgatacaacgattgtggcatatttcaataattctgccactttcgccatctctgccgtactttggatatccgcgatcattcccggctgcggcgtattctgcactaaaatagaccgaagcacaagctgcaatggctgcagatccgcatcatttaagtaaatcaatgcatcaaaatagctattccacattcccacaaaagaccacaatgccaaaacagcgatgatcggcttgcagactggaatcatgattttaaagaaatgctgaagctcgcttgccccatccagcgcagatgcttcccgcaactctttcggtattgattgatagtaagttcttgcaagaatcatattccaaacattaaatgcccccggaatcaaaatcgcccaaatcgtattcaccagatgtaactgattgatcaaaataaaagtcggaatcaatcctcctccaaaaaacatggtaatgatgaaaatcacattaaaaaatcctcttccgacaaaatctttttttgacatcggatacgcagctaacaatgtgataaacaccgaaatgactgtaaatgctgtggaatagaaaaaggaattgaaaaatcctctccagatcatctcattttccagtactctccgataggcatctaaggtccatttcttaaaatcaaagctgattccctgactgttcaatacatttggatccataaaagaagctgctacaacatatacaagcggaatgataatcgcaagtacaaataaacctaacgcgaaatatccaactcccaagatcagtctatctgacattcccagttttctttttcttcctgttgccttcatttttgcacctcctataatccttctccatcattaagcttcttcacgatcagatttactgcaatcaataaaataacattgataaccgagttgaacagaccgaccgctgttgaatatccgtaatcgccattcaacagaccaattcgataaacatatgttgataaaatttctgatgccggaagattcatcgaagtctgtaatgcgtatgccttttcaaatccaatgctcataatatttcctgcctgcaaaataaactgaatgacaataatatttttgatggccggaagttctacataacgaatctgctgaaaaatatttgcaccatctacgattgccgcctcttctaaatccttacttgcgttggaaagcgctgccgtatacatgatcgaagcccatccagctccctgccagattccactggcgatataaatggtgcgaaatgcctccggcattgccatccagtttgtattgattccaagcacctgattgatcggacctaccggtgacaaaaacattctaaccataccacagagaacaatcactgaaatgaaatttggcgcataaatcaataattgaatattcttccgcagtccaacctttcgaatccgatttagcaacagtgctaaaataatcggtactgggaatccccataaaagcccatatgcactcagtttcaatgtgttcagcaaataattcataaaatctggtgaagacaggaatctcttaaaatactccagacctacccactcacttccaaaaattcctttgatgacattgtaatcctcaaatgcgatcagtactccactcattgggatatacttaaaaataatcgtcaaaagaagagctggcattaaaaaaatcacatacaactgccagttctttctgacatacgccagcttctgcctcattgtctgctttgcagaaactgttttctttctcgcaaacgtcctcatgctttgttcctccattttcttttcctcttttataaaccggttccgcaaccggtaaagtaaccggttacttttgatttgatactacaataaaattactcctctgtcaacatttttccaaaaaatcactctcttttctcctactctaaataaccggtcactttaccagttatttttaaattgctttttacagttgttcttgctatactaatgttaatttatagaaagaggcgttttattatgagcaaaaagaaagtcacctttgctgacattgcaaaatataccggattctccaagacaactatctccagatattttaatgacccggattccctgactctggaaaatcaggaaaaaattgcaaaagcactggacgagcttgattatcaggaaaacaaactcgcaaaagttctcgcaaatggaaagagtgaatttgtcggcatcattatcccgaacctttatctacactattattctgagatgttgaatcagcttttatccagctacacagactaccattacaaatttcttgtatttgtaagcagcgaccagaaagaactggaacaacaatatttagatgagctgatggcatataagattgagggattgattgtcttaagccacacgtttccttcagaaaaactggcctcctatcatattccgatcgttgctatcgagcgggaagcagaacatatctgcagcgtcaacactgacaattatatgggagccgtacaggcagccactctcctgattcggaatcagtgtgaaatcctcattcacgtcaatgttccggttcctaagcaggttcccgcttacaatcgtatccgtggttttgaagatacctgcatcgaacaccatgttccttatgaactgatgctgcaagatcttggttccacttatgagacaacttacgaagcaatcaaaaaagtttttgtcaaaattgacaatgcttatccaggaaagaaaaaaggtgtttttctcgccaatgatacctatgcaaatatttttctaaacctagtttttcaaaaatatggaacattaccagaagagtatcagatcatgggatttgacaattcccctattgcgaacgaggcaatcatccctatttccactatcggacaacagatcgatcaaatttccaaaacagctatggaacttctgatcctccaaatgaacgagatgaagaaaaggcagcccgttcctttaagcgaaccgattcataagcagattactcctgttttgatccgccggaatactacggattaaatgcggtcaaaaaatctcctttgcacagaaaagaaaacactcaaaaaggaactgtaatactattttcttagtacaacagttccttttatttcggagtattttacctatatcaaatcatttcttctgcctatttcatcacaatggaatcttctttgatctcaatcttcctctccttaagcagccttcccactgctcttttgaatgcatttttgctcatgccgagttcttttttaatcttttctacgtctgctttatcattaaacggcagctttccatcgcattttttcatgataccaagcacatactctgcatctttatccatctgcgccggaattttctcgcggatgcttaaatccagctttccgtcttctttgaccgcagtaactcttccagtcacctctgttccgacacggaaatttttaaaaacttcttttcttgggatcagcgcagaatatttattatctacggcaacaaagactccaaagcgatcactagtgtcatagacaatcccatgtaccatatcatctttcttatatggagaatccgtgcgaagaagaccgtatactttcattgtcgcacaaagtctctgacttttgtcaatataaagtgtcacaagacatttatctcctttttccacttttgctgtctgttctttaaatggaaggaacagatccttttccagtccccacgacagaaatgccccgaattttcctacatctgcaacttcgagcactgccaattctccgactttcaattctggctcattggtcgtggcgatcagacggtcgctggaatccttatacagaaagacctcaatcggatctcccacttcaatatcctccggcacctgctttttcggaagaagcactctttcttcatcacttcccaaatacactccaaaatccacgatttttactactgtcaatacttgttttttccctaactgcatcctaattttctcctcttacttgcacgatcgcatatggtctttccttttcatctccaagcacgatcgttgtgttgtcttgttcctctatcatagacggataaatcatatctccgtacactgctgattttttgtactcaaccctcagttccctgatcttagacggcgttcccatctcttcccagacatccaatgccatctgcacatactggctattgttcacatggtgattcgtatcgatctgatgtcttctcactggaaatggctcaccctgctttcgttcttttggcagagggatctttcttcctgcatattccatcggaagcggttcctctgttccataccctgcaatttcctgaggctgtggtcttaccggacgcccttttttcagatccatgaatacccatatggaataggcataggcgattttactcccttttgcatcggtcatcacaaaatttcttgtcccatacaatccgtcaaatccgatcgcgaacgtctctactgtaacttcctcaccaagttttggccgacgctcgatcacaatctgccagaaagacaatacccatgctttctgatgctcctccatatattcacatccgactccaagttcttctgactggaaggtactgcagtcttgaaaataattgacaagattgggaatggtcagtttcctttccccatcgacttcgctgtatctgatccgttgtttccattgatatttcatttctctgcgcctcttttacttttctttctcattgataaaacttgtctccacggtgatcacacactggtatctggaatccctctcccggatgcatctgacaaataagtcatgcagctccctctgctttgcctgatcatattcatgtggcactaccatgtcaaagatcagattgatctggtctttgccgtctaccattcggaaatcatggatacttgcatctgcgtccagcgactgaagcacttcttctgccatctttctcgctgcaagtactgtctcatctttcgtctcaacgggatccatatgaatgacaagaaaaatgccaagctgcttgagcgcatcccgctcaatccggtcgatcacctcgtgtgacgtctcaatgtctgtgtcgttaggaacctctgcatggatggatgccatacttttcccaggtccgtaattatgtacgatcaaatcatggctccctacaatcccatcatactgctctacaaattttgtaatctgtacatagacttccggggaaaccgcttctccgatcaatggctccagtgtgtcttttgcaatgctgattcctgcccacatcacgacaagtgacactcccagtcctacaaatccatcgatattaattcccgtcacgccaaaaacaatcagtgaaagaatcgtcgctgaagttgtgatcacatctccgatcgagtcggccgctgtcgccagcatcacctgggaatggattcgttttcctaatttcttattgaacattccaagccacagcttgattccgacagaaagcaataatattataacagaaatcaactgaaagtgcatctcctgcggatgcatgattttctgaatcgcatctttcaaaaaggtaaacccgacctcaatgacaaggaaagatactaccagtgcagaaatatactcgattcttccatgcccaaacgggtgatctttatctgcgggcttacttgcgatccgaactcctacaaagcttatgatagaagatcccgcatctgacaggttgttaaatgcatctgccataaccgaaatacttcgcagaacaaacccgatacttatttttatcaagaataataacacattacaaaagatgccgacgacactcgccagcatcccatatcttgtccggactacgttgtttcctgtctcttcatattcttttacaaatcgttttactaaccaatcggtcataaaatccctctcttcttttgctgttttctatttgtcatctttctccgggaaaaagaaccatctcacttttacttttgcatcagaagttaccagatcatattcttcctctgtcaacacttcctgaagctctttctttccatcttccgggacgactgcatgaactgcatcaataaaacagagatttggatataggacacaccaccagttatgccctttcgcctctccaatctcaatgcgaagcgcttcatattcccctgccggaaatgtgacgtccccataagttttctccgggaaataacttgtagtcagttctaggtgaaccggatagtcataggactccccacagattactgcctgagcaatatcccccagctctccgagatgctccccaacccactctcttgtctgtgcaagatcggtatgctgcggcattttatattccatataggcaagaaccgcttccttgaccttcatcttcaatgcttgatctttttcgctgtcactatttgccaacacatggaaccgcaaaacctctcccgccatatgctcctgaagattggacaacttctcctttgctgccgcatgcatcctggttgtcaccaccccggtcaatacccctgcgatcaatactgcaagtatgaaaatcctgtacttcgctttctttgtgatccccgacacaactgtcttttctgtttctgctgcttgttctctcccactcatcactatgtacctccctttttgatataaggagtatgtaccgatgagcagtttttattcattattcctattcttttttcgagcggatcgtatgcagcacagattctacctgattctcaatatggcgacatacaatctttgcagcttcttccttgttgcgcttttcaatattttctataatctgatcatgctcttctaacaatttcacatgggattcgtcctttttcaaatattccacgcggaaacggtacatctgctcccggagattattcaacagttggatcagacgctggttgtcggtcgccatatagatcacatcatgaaatttcacatcggcttccgcatattttgtcacgtctttgctctttaatgtcacttcaaactccttcgcggctgctttcaactcctcaatctgctgtgcagtcatcttctcacaggcaatctctacggcgagttcttctaacgcacgtctgacttccaacacatcctttaagcttttctctgtgatttcggccacttccgccccttttcttgggatcatgagcacaagtccctccagctccagcttgcggatcgcctcccgaatcggagtgcggctgactcccagcttattggcaagctgtatctccatcaggcgctctcccggctttaattctccgcgcagaattgcctgccgcagtgtattgaatacaacatctctcaatggtaaatactcgtccatgcttacttgaaattttggttccatgctcttatttcctccttgcattgtgtatattcgtaatatacacctgctttgccagttctctgtctctgattgctttctgtgcctcgcgcgccattctgcggtctcggaacagaccaaataccgtcggcccacttccgctcatcatcgcgttcaaagccccgtgcgctttcatcacatttttaatctcttcgatcaccggatattccccgatcgtcactctctccagcacattgcccatcgaagctgccactttttccaggctctgctccgaaagtccctgcaggatcccatcaatatccggatgatctgtaatctcccccgaatctaatttttcatacaccatcttcgtggatacactgatcggcggtttcgcaatcagcacataacagttcggcatctgcggcagtcttgtcaattcttccccgattccctctgccagcactgtccctctcatcagacagtacggtacatctgctccaagcttgacccctctgtccatcaattcctgctcagagagtcctaaggcaaacatcttgttcattccaaacagaactgccgccgcattggaacttccacctgccagacctgccgctaccggtatatgcttatcaagtgtgatcgacactccgtcctgaatatcaaattcatcgatcagaagctttgccgccttgtacgcaatattattttcattgaccggaagatagaacaaattcgtctgaatccgtatgcccggttcctccgttcgtctcagtgtcacatcatcatacagatagatggtctgcataaccatcctgacatcgtgataaccattctctcttcttccgagtacatctagtcccaggttaattttcgccagagattttaactttaagtatctcatcttcctacccctttcgaccacaacacacggctttcttctatcagaacctctacatccgatagaagaaatcgtgtatcttgtatacattattcttatagtatactcatgttttctttaaaaatcaatatcttatcccccggtttcacctgatcttccgtcagcccattgactgcacagatcccgtcaattgtggtacagtaccgctttgccagtgtccacagttcctctccttcttttacgatataaccgacgattcccggacggcgctccagctcctctgtctgatatggctccattgtaatgttgtcaatgacctctgtctgcaccggctgtctgataaaactgcaaaatgccagaactgccttcacctcaatttctccacttcccgccatggaaatagaaagctgttcaatattatttgaaatatcatactgtgtcttctcattcattccttctgcctctaacagataagaaaacggcaccatgccctgccacgttgcaaatggtacctcatcatttgctttcacatataaaaaggagacatggaggattccttccatttgaattccgttttccgtcacttccgtgtgctctacctgaatgtctccattactatgacagatttgaaggatttcttcttttaactccggaagcgcaagttgctctgtcactttgcattttgaatgattctgaagcaacaatgtctcataagctgcttccttcttttccagattacatttttctttcagagaatatgcatcctcaagaatctccaattcttcttcctgatagatcgtgatcttcagatccagtgttgcctcaacgcccagtaccctcatttctccatcttcatccatgcggatgtccacaagagtatcctccagatttgcatagagatgatgatacatctgtgcctctgccccagaacattccaccgttccctcatagggaacagtctgttctatccagtcttctttctgttcctccgacagatataagcaaaaaacaagcagttctcctttgacgacaagctgatcgtcaatcagcttcgaatccagcttccggtttacaatatctgtccaaagaatcgtcccaatattctcctttgtgcccggcaatgtaatctcttccttgatccggtaagtatctttcttcccggtgtgcagttccagcactttcgcagtgcgctttttctggaaaatttcctcctcctcttcaattccggttgttgtctcctcttcccggagcacttcccggcaaatctgaagctctaccatcgctttcaaattcattttccgggaatggatcagcgtcggcacaaactctactcggtaatcccctacactgtatgtaacctgtgcttccccttcttcgatgtagaccatctcttcaaacggaagtcttccttccactgctgacagttttggttccacctcatcagtcacatacaacacctgaaaatatagttttccggatactctgagataattttccatccgttctatcccttcgaccttgacatgcccctccccctgtacaacacggagtacatcattttttgcatcgggtacattgtaatcgtcatctacaaaaaactgatggatcatccgctttccaatctgactgcaatgtacatttttctttcttaactccataaaacatcctcctactcaaatataatatttttatcaatccattccattttcacaacaacatacggatatgtctgtttttccgtgattttctcttccttggacggccctaaaagctccgtctgtatatagactgcattttctgtctcgtacaatgctttcacttttatactgtaaccgcttgtcggtcttgttccataccccactgcaaggtacagttctccctgatctgcataagaaagttgaaatccttcttcctttcgctctgcaatcatttcctctaattcttccggaatgtcctgcttctctgtcaccgtaaattctatgtcccgaagtttcccggtccgctctgtcttctccacacagccgcccaccgtcaacatcagacaggcaacaagaagaagaactattttcctgccaatatactttttcacctggaaacaatcacttccgctcctgcatgattctctctacatcttattatctttcttgtcttttcattccctctctagtataatattttcaataaatcaaaataatgaaggagactttaactatgctgcgttttacatttttagtgatatttttaatatcctttttaattctttccatcccagtattgcttgtagaagccatcatcgggaagttcaaccggaaggcaaaagattacagctgtcttcgcattgtccagtggggatttcgttgtattttatggatcaccggagtagaaacgaccgtgatcggcgaggaacaagtaccagatgaaccggtcttatttgtcgggaaccacagaagttattttgacattctgcttacttactcccgctgcaagcgtctaaccggctatgtggctaaaaaggagatggaacgcttccctcttttgaacaactggatgcgtaatctctactgcctgttcctcgaccgagataatttaaaagaaggactcaagacaattctgaccgggatcgattatatcaagcagggaatttccatctgtattttcccggaagggacaagaaataccggcgaggaattaagtatgctcccgtttaaagacggcgcactcaagatcgccgacaagaccggatgtgcaatcgttccgatctcgatgaacaatactgccgaaattttcgaaaaccatctgccaaagaaaggtacaaagggatttccaaaaatccggaagacgcatgtgattattgaatatggcaagccaatctatccacacacacttgatcgggaagaacgcaagcaccttggtgcctactgccagaatatcattcaggaaactatcaataaaaacgctgcactgctcgaaagcgtgcacgaaaggggctaagaaccatgacaacacaaaatttaacattattgaccgatttttatgaactgacgatgatgcagggatattttcacagcaaagaggaaaatactcctgtcgtctttgacatctttttccgcagtaatccatccggcggcgggtattccatcgcagcaggactggaacaggtaattgaatatatcaaaaatttgaatttttcttacgaagatgtcgactatcttcgcagcctgaatctatttgatgaaacttttcttcagtatttaagcggatttcatttcagcggaagtatctatgcgatcccggaaggaactgtgatcttccctagagaaccactcctgaaggtgattgctccggtgatggaagcgcagcttgtggagactgcactgttaaacattatcaatcaccagtcactgatcgccacaaaagcttcccgcgtcgtctatgccgctgacggagacggtgtgatggaatttggacttcgccgggcacaaggaccggatgccggactctacggcgcaagagccgccatgatcggcggatgtatcggtacttccaacgtgcttgccggacgaatgtttgatgtaccggtaaaaggaacccatgcacacagctggatcatgagtttcccggatgagtacactgcttttaaaacttatgccaagctatacccttccgcatgctgcctgcttgtagatacttacgacaccttaaaatccggtgttccaaatgcgatccgtgtcttccgggaaatgcgcgaagaaggaatcgaactgaaaaattatgggattcgtctggacagcggtgaccttgcttatttatcaaaaaaagcaagaaagatgctagatgccgctggcttctcggatgcattcatctcggcctccaatgaccttgatgaatacctcattctcgacttgaagaatcaaggtgccgcaatcacttcctggggggttggtacaagtatgatcacatccaaagactgtccggcattcggcggtgtctacaaactcgctgccattcagaatgccgacggtgaatttattccgaagatcaaactctcagaaaatacggaaaagattacgaacccaggaaataaaaccgttcaccgaatctatgacaaagaaaccggaaagcttcttgctgacctgatctgttttgtcgatgaagtcttcgacgaaagtaaggatctcctactctttgatccagtagaaacctggaagaagacaaaactaaaaggtggtacttacacgatgcgcgaactgttaaaaccagtcttcttaaacgggaactgtgtctaccaatcaccgaccgtcatggaaatcgctgattactgccgcaaagagaaagaaacactctgggatgaagtgacacgtctgttcaatccgcataaagtgtatattgacctctcaaagaaattgtatgatgtcaaaaaagaactgttagatcagatgagtattcaagaataggagaaactgattatggaacatatgtcattacaggaaattacaacagcctgtggcggaacctattacggggaaccgtcactgcttacaagagaagtatccggtgtcgccatcgacagccggaaagccggaaaggattttttatttgtcccgatcaaaggagccagagtagatggacattcttttattccacaggtgatggaacaaggggcactctgcacactctccgagcacccgctttctgacagttccccatatatccttgtgagttcctgcgcccaggcgctcaaagatattgccgaacattatcgcagggcactcggaattaaagtagtcgggatcagtggaagtgtgggaaagacaagtacgaaagaaatgatcgcttccattttggaacagaaatattccgttttaaaaactgccggcaacttcaacaatgaaatcggtctcccactgaccgttttccagattcaaaaagaacatgaggttgctgttcttgagatgggcatcagcgactttcaggaaatgaaccgcctagccaaaattgcacagccagacatctgtgtgttgaccaatatcggacaatgtcatctggaaaatttaggagaccgcgacggtgtgcggaaagcaaagacagagatgttcgcccacagacgtccgggcgcttcaatcatcctaaacggagatgatgacaaactgtctgaaattgcaacagtgcatgccgcttctttctccaaacaagacggtacaactgtcgttccttattctgattcgactcacgatgagacttctgccgcatccgctgtcggcaaatccggggatacgactcctatcttctttggaaaagatccgcacaatgctttctatgccgatgaaattcaaagtctcggactcaaaggaacttcctgtaagattcacactccagcaggtgattttacagtgatcatttccatcccaggtgcacacatggtatacaatgcccttgccggaaccgcagtcggcattgaacttggactgacactcgatgagatcaagaccggaatcgaagcattacagccagttgccggaagaaaccacatgattgagacagaacatctgacaatccttgatgactgctacaatgcaaatccagtttccatgaaggcctccctggatgtcctctccaccgcacttacaagaaaggttgcaattctcggagatatgtttgaacttggaacgaaggaacttctccttcacagagaagttggtacctatgcagccgaaaagaaactggatctcctctgctgcattgggacattatccaaagcaatggcagatggtgcatccgaattttctgcacaaaacgatacaaaaatttgctattttgagacaaaaaacgactttttaaatgctgtttcttctattataaaggagcacgatacaattcttgtaaaagcttcccatggaatggcttttgaagagatcgtccacgccctctgtcacttaacattttaaaaaacactcaggagaattgacatgaattatgaagtattagttcttgatcttgacggtacactcaccaactctgaaaaaaagattacagaaccaacaaaagaagcgctgcttgacattcagcaaaaaggaaagatcgtcgtgcttgcatccggccggccgacccccggcatcttgccgcttgcccacgaattggaattagaaaaatatgggggatatgttctttcttttaatggcgcaaaaatcatcaactgcagtaccggagaagtcttatacaataagacgattccttctgaagtgatacgccctgcctatgaactggcaaaagattatgatgtggatattcttgcatattccgatgatgcgatcatctccggaatctgcccgaattcctatacagaattggaagcccgaatcaacagtcttccgatctgccgtgtagaaaatttccctgcatatataaattttcctacaaacaaactgttgatctcaggtgaagagtcgctcactgccgaactggaaatcaaattgaactcccatttccgcaagctactcaatatttaccgctcagagcctttctttctggaaatcatgccacaaaatattgataaggcatataccctccagaaattattatctgcaatcggcctgaccgcagaccaaatgatctgctgcggcgatggttataatgatattaccatgctggaaagcgccggactcggtgttgccatggcaaatgcccagccgcttgtccgtgaaaaagcagattatattacaaagtccaatgacgaagacggtgttctgttcgtcattgatcaatttctcagatagaagctttccacttcattttgccggctgttccctttcgggagcagctttttcatttgtccttctttcaaacaaattttctcctcgtattttttagaagccggcaacttttccaaacgtctctttcatcgactcatacaaatgatcttcttctccaatacatttattccgaaaatccatcagttcgcacataatcttgataaaaaatgtattgacttctttctcatatgtattttgtttttcccggtctttttccggcagatttgctttcttttcttctctttgttcttctgataccctagcataaagtgtgtgaagtaaatttccatttgtcacattgactactgacagatatttctctaccagcgccaagtctccataagtaactgcgttggaaaatgcataacgaatagacttttctaccctgcaataatttgtcttattcatacgcgctaccttctcgtatacaatcatcatcttcgcatttctccatgcttcgtcttcttcaaatagttccatgatgtccaaaatatacttgaatcctttcaaattcgctggtatcccaatctccattaaaatttcctgtacccgttctctcatcactctactcctttcgacaaactggtaaatccttagaaagcacctgccctttaccctatcgtatttgtctaaaatagtcaatctttttgttgactttaaaagaatcttgtaatattatgggtttgtttaacaaaatattatatcattttagggagattttacaatgagtttaggagatagactgaaagaacgacgcgttatgctgaatttaagtcgaaaaaaattaagcgagatcacttacattactccacaagccctggccaactatgaaaatggaatcagtactccgaaatttgaaatattagtcagcctttttcaatcattagaatgtgacgccaattatctataccaggattatctgcccgccaatctccagacagactttaacattacaaaaaacgaacaagatctcatcgaaaaataccgtcagctcaatgaccatggaaaacatgtagccaaactgatcattgacgaggaatatgctcgtatgctggaaggtcttctccggaagaaatgtgtctccttcccatgcctgtttccaacccttcacaatgcctggacgttccatcttgacgactgtttctcaaaggaagtcagtatcctgcctaaccatatcacaagcgagactgattactgcatcagaattccggatacggatattctagagcctatttttcactccaacgatattcttgccgtgaaaaactgtccggttcatcacaatgaaatcggagtattctcctttcagcataagatgtacattctgaaattatatcatatgggaaatacgattaaactgattccattccatgtcaatgcaacgccaatccatatccatccgatgagtgatttcaaatgtctgggaaaagttctcggtgttgtgtctgagtaggtcgaatagttctctttgtgaacagtccttcattttttcttcttattttattcacaatccttttattttttgcacacacaatcaacacatttttccagtatagttattattgtaataaatattactgaagcaacattcataatactattactaataacatctttttcataacttttctccaagaactgcgtccccaacgcagttcttatttttttctttttctctacactattttacaagtcatcgaccaacgcactgctctttgcgtaagcggtgctttttgcctcaaagaaatctgttttgatcatatttgcgttggaaaactgactgacccatcccatactctccggctctttttcatgcccttcataaattggcgcaagcccaagatttttgcagcgcagattgcccagatatttcacataatctgtgatcatgtcacagctcagtccactcactgcatcgccgatcacataatgcccccatgcaatctcctgctcacagccttctcggatcatctgacgatattctttttccttctcctcgctgaataattctggaagttcttttctgagttctcttaaaatattggtaaataaccataaatgtgtgttctcatcccgattgatgtaacgaatttcctgcacggaacctgtcatcttctgatttcgcccaagattatagaaaaacatgaacccactgtaaaaataaattccctccaaaatatagtttgcaatcatcgtccgcacgaatgcttccagacttttctctctctgaaattcattgtacagatttccgataaattcattccgactcagcagatgcggatcatctttccactgatacagcacttcatttctctcctgcggctcacagatcgtatccagcatataactataactttgactgtgtactgcctcctgaaatgcctgaatcgacaggcacagatttacttcatttgctgtaatatattcgctgatgttcggcagattcgcagtctgaatactgtccagaaatacaagaaatgataaaatcttatcgtatgctcgccgttccggtgccggaagcgtgcgataatccctgacatccgcaccaagattaatctcctccggaatccagaaattattcattgcctgccggtaccagtcactcacccagctatatttcatattgttgaaatcatttaagtttgtcgtatttcccccgacaatccggcgcaagcgtacttccgtatcccctgccggattaaacagcggttttttctttaactctgccatttgattcgttctctccttttctcttttctcccaggcacactcttctacgcagagcacacttcacactcttccacttccagactcttagaacggatatagtagatcgttttgactccctcttcccacgcaagcaaatatagatgcaatacttttcggaacgtatactcatttgtaatataaagattcatactttgcgcctggtcaatgtagcgttgccttactccacaggcacggacagaccaagtctgatcgatatggtgtgcgttcttgtaataccagaacgtatccattgtaagctccggcgccacacgcggaagaattccgcttttcttttcctcaagaaaatacctgctcatgaccgggtcaatccccgctgtcgttccggcaatcatacttgtacttcccgtcggcgcgatcgccatcagatacccatttcgcattccattttccctgaccttttttgccagctttttccagcggtcttcggtcagatgtctctctgcaaaatattctccggtctgccatttacttccttcaaaataggtgtagcaccctttctccctggcaagttctgcacttgcttccaccgctgcataatggatctctgcaaatacacgctctgcgaatgccagatgttcttcgctctcccatggaatctcatttttcgccagcatatgatggtaaccacttaccccaagcccgattgggcgatatttctcattgttaatcttcgcgtatggtaccggaaaaaagttcagatcgatgacattgtccagcgcgcgcactgccgtcttcgtgatctctgacaactcttccctgttattgacatcgatccttccaagagagagacttgcaagattacatacaacaaattctcccggctttgtgactgtcacaacaacctgctccccgtcaatctctgtaatcttctcctctgtcacttccatctcactcatattctgggcaatctctgtacagagattgctgcaataaatgattcccttatggctgtttggatttgcccggttgacatgatctctgttaaatacgaatggcgtccctgtctccacaacgcttttaatgatcatccgaatcacatccttgatcggaatgactctcttttggatctccggatcagccacacaatcgagatattttttcttccattcttctccaaaagaatcttccagtgcatatccttttttcttcaagatctcatgcggacacatcaaataccattctccctcaagattgtctctcgcctgttcccagaaataatccggatagcatactcccgggaaaatatcatgcgccttcattcggtcatctccgttatttgtccgcaagttgagaaattctggaagatcccgatgccacacatcaagatagaccgctgctgctccctgacgaaccccaagctgatcgaccgcgactgccgtgtcattgaccagacggatccagcggatcacacctcctgctgctccctcaaatccacggatcgggcttccgcttgcacgcacttttccaaagtacattcccattccgccgccaagtttgctgactttcgcaaaattatcaatgctcttataaattccatccagactgtccggcactgtatcgataaagcaggaggaaagctggtggtgcggctttctcgcattggcaagtgtcggtgtcgccaccgtcacctgcagcttgcttaacatattataaaacttctccacccatacagaccgatcacacggttccttcatcgccagatgcatcgcaatcccgagaaacatctcctgcggactttctaacagaacgcccttctgatctcggatcacataacgattcagaagcagttccagccccgaataattaaaaagatgatcccgttcctcccgcatcaatttctcaaatgctgtgatttcttcctccgtataattttctaaaatataagcaccgtacagattctcttttgtcagataacatattttctcataaaaagaattcacgttccgctgtttcatctgttctttcaactcatttcgaaatgttaccaggcgaatccgcgctgcgatcatctcccatttcggtgcctcctgcgtcgtcaattccactgccgctttgaggagcatcttcatttgttcctctcctgagaatcctgttttatagaatgtatggtatttttcttccagcttttccaagctatataccggatccagaaattccctgctgatgtctgaaaatacttcctgaagtccttctgtttccggaaaatcgtagttttttccttcttgatttatattcatttcttatatcgcctcacactatttattgtattgctttcttgatattaccacaatatatagtgcttcgcaagattttttcctgcttgttctcacttattctgcgaaaaaaataattgatagcttcttacgaatatccttaaaataattttcagattacaaataaattcggagatcctctgcaagtttttcctccaggcgaatcagttttctggcaatctccttcactttccattccgcttcaggatactcattcaaatatctcccaagagacttcactcccatattacagccatctgtgatcagatctgcgattgttgcatcagactcattccatacaagcctgacattagtcttcacccacgacattcccttcgccatcattccaggctcttttccctcatcctgatattccttcaatatttcctggatttctttttccagcttctcatgtttttccatacagtcagacaggcattggtacaatttcttctcgtgtacatattccaacacttcctcaatcgaagaaattcccattttaatccctgcatcacattctcttaataatttaattgtatccggttctaccatttttgtttccacctttctctttcttttggtgaaagtatacccgatcaactaaaaaatattctcactacagtatctctccagattttcaagtactttcttattcagccgaattacggcctgccttgtcatcccagatgaacacttctgacatctgacattttcccgcgcaagaagcgattcttctccaagtcccatcagggtgtcacaaaaataccaggtattgttccgctccagccatttctcaatcgcatgctgctcaaaacaaggactcagcgccgtgttaaataaaatcgtattttctccgagtgcctcaaactcttcctcgtataacaacgtcacatttttactcaggcaactacaaacgacatcactttcttttaataactctgaaagttcacagtaacggtacccctcctgctcttccagttccggttttctcgtccggctgtaataactgatctgtgctcccattgcgcctaatgctcttgcgactgcctgcgcgcttgccccaagcccaagtaatccgatcctcgcaccggaaatctccgaactctctcctaaaagaggcggattcccatctgccccgtgaagccgtccgatcaggttcatcagcacatactctgctacgccttcatcaccgtaatcccggattcctgtcactgtgattccatgttctcttgcataagcaatatccacattagaactttcctctgaatacagactgcagcacatcccaatgtatacaagattcggacactttgctaagatttcctccccgattgcatgtgtataactgacaaataccgcatctgcatctccgattctttctacaatctcctctgcactctctggctgcgaatcaaagaaaatgatttcctcacaaaattccttcaatttttctttactctcttccagaatagaaaccggctggattgccacaagtttttttatttttttcataagtttttccttcccttccatatgtttcagctattattttattatagcactggatgtgactttgtcctattggaaacaaaaaagaaatctattttcaaaacataaaaataagagctatgcttcacctcactgcatcccatagctcttatattccttattattttaatctcttctcaattatttcttccctctactcctctgcaataatgtcacgcattctgtgtgaacggtattcgggaactggtcaactacctgtactttttccaacgcatacccttccccgcatagatattttaaatctcttgccaatgtagcagaatcgcagctgacatagacaattctgtctggctgcatttttaccattgtttcaagcagcgcttcctcgcacccttttctcggcggatcgacaacaatcacatcggcatgtgcctgctgccccggatgttctttcgcataattttcataatatgccggaagtatttcttctgctttcccgacaaaaaattctgcatttttcatatcatttaattctgcattttgtttggcatcttcaatcgcctgcggtacaatctcaacaccgtacacctgctttgccttttgtgccagaaaaagagaaatcgttccgattccgcagtacagatcccacacggtttcttctccggtcagccctgcatattctaatgcatatttataaagcttttcggtctgtaccggattcacctgatagaacgacagcggagaaatctgatattttacatttccaatgtaatcggtaatgtaaccatctccccagagtacttctatctcttttcccataatgacatttgtattttctttgttcttgctgaaagttatactcctcatgccctcgatttgagataacttatccacaaatttgtccgcacatggcaggttatccccattgatcacaaagcaaaccataatctctttcgtcgtaaatccataacggattaaaatgtggcgcactagtccgctgcaatcctgctcgttatacgccgggatgtggttctcattcatgaccgaaagaatctcctctaaaatctgctgattctgagaaacccccagcgcacaatctgtattcgggatgatctgatgtgtccttcccgcatagaatccggcgactgccttgccgtccttgtccgtcccaatcgggaactgcgctttattccggtaatgaaacggctcgtccatcccacacaccggctgcgtgatcttttctaatacttccggcgcaaatcctccgattcgttccagatttccaatgacttttttctgcttgaactgtaactgttcctgataatccatctcctggatctgacatcctccacactgttttgcgaccggacattttgcttccacacgattttttgaaggttcaatgacacgaagcagcttcgcatatccatagttctttttcgccttcatcactttcacttccacaagatctcccatcacggtatccttgataaacagtgtatatccgtctgcctttccgattccctctccattgatcccgatatcttcgatcttcacgaccgctgtatcatttttcttcatgatcttcctcctaccataaaattgtatccgtttccaacttctctttgcctttttggcattttcatcactgctcgcgcgtgaagcgtgttttttacataagaatttcctatgtaacaaagaaagcgggtgccgcaaaatcaatttcttagacatggtatagttcatctctgattcgatgcaatctatatcttgttgaaattctctgttttgcagcaccctttttcatctctctgtttttatttctaaatacttgtctttcttaaattactctcgaacagtctgttatatccaagccagtctgtcgtatctttttctttgaaaatctctgtcaaagtctgtaacttggcatctgtgctgtccgcgaaattaagtgccagcgcttctgccagcgcaggctttttcggagaaccgtattctaactctccgtgatgtgcaataatgcagtgcttcaactcacttgccagcttttccggaaatcccggaatagatcgaatcgcatcgtttgccatctcgactccgataatgatatgtccgagcagctgtccatcatccgtataatcattttctggaaatgcggaaagttcttttgtcttcccgatatcatggtacatcgccgccgcatacaaaagatctttattcaggatcggatacgcccctacatagtattcacacattttgacaatactgagcgtgtgctccaaaagacctcctgcaaatccgtgatgtacactctttgccgcagagtgtgcctgaaaccgcttaataaatgccgcatcgtctttgaaataatactccactgctcttctcaaatattcattatcaatctgtgcaacatatttcatcaactcctgatacattccctcgacactcttctcacttgtcggcatgtagtctgccgccacatactcatcttcaaatgccttgcggatctgcttgatattcagctgaagatttccattatagcaaatgacatctccgaatacttcgataaaatccatctcatcatagtctgcaattccattagaatttggatcccacacttttccgtctaaagttcccgttttatcctgtaaaatcagattgtcatatgcctttccatttctcgtttctgcagagcgctttcctttgcacaaataaatacagcggatggtctctccctcatgtaatgtattaatatatctcatttctgtcctctttctattataatattctcattttaattcttctatttcttctcggctcctccgatgacaacggtataactgatctccacatatccttcggatccaagtctttttgccgacaacttcacttcatctcccggctgaaatgtcagcagtttgttatgcagtgctttcacggtcaccaccggatcgccgtccattgcagtgataatatctccacactgaactcctgcagtcattcccggagaatctgcctcaatctctttgacatagattcccttcggaagtttctgtgcctctgcaatttcatccgtcacattcgtcccgacaataccgatatatggaacactgttgccatttagcagcttttccagttcttctttcacatccgaaactgcaaggacacgcagtgtactgctttcatccgtcacctgttcggcagcaaatgtaaatccgatgacttcaccgtcgatattaaataacacaccgctcccttgtctggaggcaggtatgtctgtgtccaacagccggtatactcggtctgctacactgactgtatttttattggaactgataatgccatatcccatccctttggagtaaccaaacagacttcccagtgcaatcactacatctcctttgtaagtcatgttagaattgccaaggacagcctcctggatctgattctttgtgctgtcactgacctgattccgatcaaccgcaagcacggcaatccccaacaccgcatccttctttctgactgcagcatcacaggatgcgccatctccaaatgtcacctgaatctgctctgcatccttgatggcacttcccatcgtcaggatcagatattctctgctgttggacggcatgatcacaccacatgcaccggttccttcttttcgctcttcctctgtccagttatcatcttctccggcagaagtcactgagacaatacttttgttcgcctccgcagcgacctggtacatcgcacgttccagctcttcaaaattttcaagggtaagctccggctctctttcttcttcctctgcctttgcttcctgtggatgttcttcaggttcctcgtcctttggaatggtaatctcttcttctgcattcagctgttcatcaacccatggttggaacacacaaaaactaatactggcaaacgcaccgaatagaattcctgccgccgccagcccggctgccttatgcatgagcttttttcgattcagaggcttctccttgattacctcctgcaaaaaagaaaatttttctggtccttccttgttctccatagacatgacgtatctcctttttcatcctctttacagtataccctaacatttgtcaatgttcaataagtatagaatatttctgctttcctttattacaaatataaggtagaatggaaacaggtgaatgattatgaataaaaagactttaaaaaaactagaatacaacaaaataactgaattacttgcagagcaggcttcttccccgggcggaaagatactctgcagccatttggctccgatgacctccctggccgaaatcacaaccgcgcaagaacagaccgcggcggcttttacaagaattgtaaaaaaaggacgtctctctttcagcggtgtatacactgtggaagattctctgatgcgtctggagattggcggagcgctcggctgtaatgaactgctccgcatctgcaaattactggaagtgacaaaccgtgccaaagcttatgggcggcacgagactgtggacgaagagcaggactgcctcgacgtgtatttcgatcagctggaaccactgtcgatccttgccggcgagatccgccgctgcattatcgatgaagatgagatcagcgatgacgcgagcagtaccctgaagcacattcgaagaagtatttcccagacaaacgataaagtacattctacgctgctttcgcttgtcaacggctctctgcgtacttatctgcaggatgccattattacgatgcgcggagacagatattgtcttccagtcaaagcggaataccgcagccaggtacagggaatgatccacgaccagtcttctaccggttcgacactctttattgaaccaatggctgtcgtaaagttaaataatgatctaaaagaactttacggaaaggagcaggaagagatccaggtgatccttgccaatctcagcgcagatgccgccggctatgtgacggagattcgcagaaactataagctgcttacagaactggactttatcttcgcaaagggttcctttgccctctccttaaatgcaagcaaaccgatttttaacgaccatggctatatccatatccgtgaaggacgccatccgcttctcgataagaaaaaggtagtcccgatcacggtcacactgggagatgcctttgatcttctgattgtaactggtccgaacaccggcggaaaaaccgtatcgctaaaaacagtcggtcttttcacgctgatggggcaggcaggacttcatattcctgcactggatcgctcagaattggcgctgttccacgaagtgtatgcggatatcggcgatgagcaaagtatcgagcagagtctcagtaccttctcttctcatatgaccaatatcgtttccttcctgcagcacgtggatgagcactctcttgtgctgttcgatgagctcggcgccggaaccgatccaaccgaaggagctgcacttgcaacttccattctgtcctacctgcacgagcggaaaatccgcacgatggcaacgactcattacagtgagctgaaagtctatgcactttccactccaggtgtagaaaatgcctgctgtgaatttgacgtagagacactccgtccaacttaccatctgctgatcggtatcccgggaaagagtaatgccttcgcgatttccagtaaacttggtctgccggattatattatcgcagatgcgaaagaacgtctgtccgaacaggatgaatcctttgaagatctccttgcagacctcgaaaacagcagacgtaccattgagaaagaacagcaggaaatcgctgcctacaagcgcgaagtagaagctctgaaacagaaattagagcaaaaacaagaacgccttgacgagcgcaaagagcgtattatcaatgaagcaaacgaaaaagcaaacgcgattctccgcgaggcaaaagaagttgctgacgagactatgaagaacttccgcaagtttgggaaagaaaatatctctgccgcagagatggaacgcgagcgcgaacgactccgccagaagatcaaaaagaccggatccggtgtgaagcttgatacgaaaaaaccgaaaaaacagcataaaccaagtgatttcaaactcggcgaggccgtaaaagtgctcagcctcaatctgaccggaaccgtaagttctcttccaaatgcgaaaggagatcttttcgtacagatgggaatccttcgctcccaggtaaatatctccgatctggagatcatcgatgaacctgtgatcacggggaaacatctgcagaagacttcctccggaaagatgaaaatgaaaaagaccatgtctgtccgcccagagattaacctactcggaaagacagtagacgaggcaatcgcagaacttgacaaatatttggatgatgcgtacatgtcgcacatcagtcccgtccgcatcgtgcacggcaagggaaccggtgcactccgcagcggtatccataactatttaaaacgacaaaaacatgtaaaatcttaccgcctcggtgcgttcggtgaaggagatgccggcgtcacgatcgtggaatttaagtagtagatttgaaataaaggagggattcctaccccatggtaactaaacagaaaatcttaatcgtcgatgacgatgaaaatattgcagagctgatctccctctatcttttgaaagaatgcttcgacacgatgatggtacatgacggcgaggaggcgttagctgcatttgacaactattcgccaaatcttgtactgcttgacttaatgctgccgggcattgacggttatcaggtctgccgcgagattcgggcaaaatcagatactccgatcatcatgctctccgcaaagggagaagtctttgataaagtacttggtctcgaacttggtgcagatgactacatgatcaagccttttgattccaaagagcttgtcgcaagagtcaaagcagtgctccgccgctaccaggcacctagacaggaaactgctgccgcagagaaaggcaaatgcgtttcctaccctggcattgagatcaacttgacgaactactctgtcgtctgtgacggaaaagtagtcgaaatgcctccaaaggaactggaactgctttatttcctcgcatcctcaccaaatcaagtatttacaagagaacagctcctcgaccaaatctggggctacgaatacatcggagatacaagaactgtcgatgtgcatatcaagcgtctgcgcgaaaaaattaaggaccatccgacatggagtctcggcaccgtgtggggtatcgggtacaagtttgaggtgaaatagtatgcgcagcactttatacttaaaatttatcagcatttatctgatcttcggatttctctgcctgttcacagtcgccacactcacccatgagctgacaatctccgagctggaagaagatacttctgataccctttataaagaagccaccctgctcgccaatgattacctgaccggatattttacagacgatctgacactttccgacattcacacgcagttaaatgggatgtcgacctatctgcatgcatcaacatggttcattgaccgcactggacaggtgattctatctgcgggagcagatgaaatgccggttccgccatccgaaatcccagactttgatcctgcggaaaatggcagttccaaatatctgctcggaacttaccatgatctttttgataaaaaagtcatcacagtgattgcaccggtcacacaaggctttacgacgaagggatatctgctgctgcacaaaccttacgaagatctcgaacagcagacttcttctttattgcgaaatgtctatattaccattgttgtcatctacattttatctttctgcatactgctggcattccactttttcatttaccagccgctgcggaagatcacagaggctgccacccagtatgcctccggcaatctgacttatgagatcccggtgcggacagaagacgagatgggctatctgtctgcctctctcaactatatggcagcacagctcaaagatatggaagactatcagaagaagttcatcgccaatgtctcccacgacttccgctctccgctcacatccatcaaaggatatgtggaagcgattgtcgatggaacaatcccacaagaacttcagggaaaatatttgaacatcatactgtttgagaccgagcgcctgacggatctgacaaaagatcttctgacattaaatgaatttgacacgaaagatcttcttcttgacaagaccaacttcaatctgcacgacacgatcaaacacactgccgcttcttttgaaggaacttgtacctccaagaaaatttcaattgaactgctctttgacccgcgcatccagaatgtctttgccgaccgcggtaagattcagcaagtcttatacaacttgctggacaacgcgatcaaattcagtaatccggactcttccatcgtactcgagacgaccgaacgcaatggaaaagtgttcgtctccgtcaaagactccggaatcgggattccgaaaaaaagtctcacaaaagtgtgggagcgtttctataagagcgatctctcccgtggaaaagacaagaaaggaaccgggctcggacttgcgatcgttaaggaaatcattcaggcacatggagaaaatatcaacgtcatcagcaccgaaggagtcggcacagaatttattttctcactcacaaaaagcagtgaaaattaatctcttccttacacgaaaagaaacgatacaaaaaaaagagaaacacatttcctccactgaaatgtcgtttctcttttttgatgatttgtattagtatctgcattgattacagctttatctgcttttgaatttcatattcctttcctcactaatacaaaatacggctgatatttttatcttccatattatcttttgtcacccacacatatcctgtatcaacaactgcctcatttccttgattcgcgatggaacgcgcacaggcaatcacagtcgcatatcccataccatacggattctgaacaacaagaccttccagttctccattctccagcgcctccatctgtttctctcctccgtcgaatccgattatcttgagattcttggcagcctctgcctgcttagtatcttttgactgcttcatctcattgacaatcgacagtactttctgtgtcgcatccacattggttgtaaaacagcccgtcacatccgggtgctgctccagaatatactggattgcctgctcatcagtaaagtcttccttctgcgctgccttctcatcttctggattgattttcgcttcccggttcttcttctctgccaaaagtcctttcacgtcttccagattatccaggtagacaacttccgcgatctcaacttccggataatcttttgcgagtgtatccgcaaaaccactctgacgctctctcgcagtagtagaattagaatcgtggacaaatacgattacctttcccttgttatctaatgccgtagccagattcactgccgcagtctgtgctgcttctgtattattggtagagcagagtgactgcagtccctggtaatcacttccggaatcaaaggcaacaattggaattccattctctgtagcaagatcaaactgcaccgaacaagcattggagtcaatgatcgcaatcccaactgcatttggatagcgggccagttcttcatctaaaatattaatctgctcgtccacgctctcactctcgctcggaccactgtaatttaacttgatcttatcttcccctttgtaacccagtgcactgttcaattccgatactgcttgcttggcgcctttttctaccattttccaatattcggttccggcttccttcccgatcagggaaatgtatgttcccggttccagggtaagaccgtccacattgctgtatgcctgcggagaaataatatttaaattgccctgtccttctttctctttcggctcctctttttctgtatctgcctgtgtctgtgtatcttgcttctcttcctctgcttccttcccacaagaagaaaatagaagcattgcactcatcagacatgccagccctatgatgctcttccttcttctctgcattttttacacactccattttttcattctgaacgtatatttcaaagcctatgtcacacacttgtaaatatacgtaaaatcttcgggcaccggcaatgacttctcacaattttaaaagaaaaaaatcaacttccgtccaccctctaggttattacctatctactatacactaaattacaaaaaatagaagaaattttttcttaaatttttataaggttttatacagtgttcacaatttgtatactgtatgcaatttagtacaatccaacctattgacttttcttatagcaaattgatataatctaagtgaattatttaacaaacattttacaaactactaacttttttacaacgatttaggaggaaatataatggaaaaaaactggaactctagttgggacggattcaagccaggacgttggaaccgtacatcagtaaacgtacgtgacttcattcagtcaaactacacaccatatgagggggacgattctttcttagcaggtcctacagaagctacaaagactctttgggctcaggtaatggatctttcaaagcaggaacgcgaagcaggcggagttcttgacatggatacaaaaattgtatcaagcatcacttcccatgcagcaggttacttaaacaaagacttagaacagatcgttggtttccagacagataaaccattcaaacgctctttacaaccttacggtggtatccgtatggctcagaacgcctgccatgaaaatggatatgaagttgaccctgaaatcgtaaaaatctttacagaatacagaaaaacacacaatcagggtgtatttgatgcctacacaccagagatgagagcagcaagaaaatctggtatcatcacaggacttccggatgcatacggacgtggacgtatcatcggtgactaccgccgtgttgctttatacggaacagactggctgatcgcagacaagaaagaacagcttgctacttctttagtgagaatgacaggagataacatccgtcttcgtgaagaattatctgagcagatccgcgcacttggcgaattagcaaaattaggagaaatctacggatacgatattacaaaaccagcttccaatgcaaaagaagctatccagtggttatactttggataccttgcagctgttaaagaacaaaacggtgcagcaatgagtcttggacgtacttctacattccttgatatctatatccagcgtgacttagaaagaggactgatcacagaggaacaggctcaggaatacattgaccacttcatcatgaagcttcgtcttgtaaaatttgcacgtacaccagaatacaatgcattattctccggtgacccgacatgggtaacagagtctatcggtggtgttggtgttgacggacgtccgctcgtaacaaagacatctttccgttaccttcacacattagacaaccttggaacagctccagaaccgaacttaacagttctctggtctactcgtcttccaaaagcatttaaagaatactgtgcgaagatgtctatcaaatcatcttctatccagtatgaaaacgatgatttaatgcgtccgactcacggagatgactacgcaatcgcatgctgtgtatcttctatgagaatcggtaaggaaatgcagttcttcggagctcgtgcaaaccttgcaaaatgtttattatacgcaatcaacggtggtgtggatgagaaatccaaagtacaggtaggaccaaaataccgtccggtagaaggtgaataccttgactacgatgatgttatggctaaattcgacgacatgatggaatggcttgctgaattatatgtaaacacattaaatatcatccactacatgcatgacaaatattgctacgaaaaaatccagatggctcttcatgaccgtgaagtaaaacgttactttgcaacaggtatcgcaggactttctgttgtagctgactctttaagtgcaatcaaatatgcaaaagtaaaaccgatcagagacgaagatggattagtagtagactacgaagtagagggagatttcccgaaatacggtaacaacgatgatgatgtagatgagatcgcagtaactgttgtacgttctttcatggacaagatcagaaaacatcacacataccgtcacggtgttcctacaacttctatccttactatcacatctaacgttgtatatggtaagaagacaggtaacacaccagacggaagaaagcttggagaacctttagcaccaggagcaaacccaatgcacggacgtgattctcacggagcattagcttcccttgcatctgtagctaagattccattcagacatgctcaggacggaatttccaacacattctctatcattccgggagcacttggaaaagaagataagatctttgcaggtgaccttgaccttgacagaatcgaagaatgtggaaaccaggcttgcaacattccaaacatcatggacagcatcgacaacgaataatctgtccgacaatacaaaaatcagataaagaaaaaccaaaatcaaggaggataacactatggcagtaaatcagcagcaggtagataacttagtaaatatgttagacggatacgtagaacagggtggacaccacttaaatgtaaacgtatttacaagagaaacattattagacgctcagaaacacccagaaaactacccacagttaactgttcgtgtttcaggatacgctgtaaactttatcaaacttacaaaagaacagcaggacgacgttatttcccgtacattccacgaaggaatgtaatgtaacggcagagagagccgtctgatgacatatcgtctatgtcatcggacgttctgttctccgtatcgaattgcaataatgacttcaaggggctgccgccgaaatggtttctgatctttccattctgcgacagccttttttcataccgaactttatcatactgaaaggcaggtgtcttttatgacaaaaggatatatacattcgattgaaagctgtggaaccgtagatggcccgggactgcgctacgtaatctttcttcagggctgcccgatgcgctgtctgtactgtcacaatccagatacatgggagccaaacatcggagaacaacaaagtgtagaggaagtactcgaaggcttctactctaatctcccattttaccgccatggcggtgtgactgtgacaggcggtgaaccaatgatgcagatggattttctgatcgagctctttacaaagctgaagaaagatcatatccacacctgtatcgatacttctgggattatgtttcagccatccaatgcagtatttatggaaaagctggaaaagctccttcaggtcacagacctgatcatgcttgacatcaaacatatcaacggagaagaacacaagaaactgactgcacactccaatgagcgtatcctggcatttgcacgctatctcgatgagcaaaacattccgatctgggtacgccatgtgattgttcccggcatcactttctatcaagaatatctggaacaacttggcacatttctcggaacactgaacaatgtcaaagcgcttgatattcttccttaccactctatgggaaaggcaaaatatgataaccttcatatggattatccgttaaaggatactccagaaccaagtaaagaagatgcagaggctgccaaacgtgttgttctcgctgcatataagcatgaaaagcagcgtctgaacaaactgtcggaagaactttaagacaaattgttccggtccctgttctgttgtcttctagtctttttgtgctctgattgaaactctttttctttgtattaaattcagagcacaaaatagacttgtatatttggctcatttgtattaaaataaacacaaataggcagagttcattctgccacagaaaaggaggatacatactatggcacacgtaattagcgatgaatgtgtaagctgtggagcttgcgaagctgaatgtccagttggagcaatctctcagggagcagatcactacgaaatcaatgctgatgcttgcgtagactgtggagcttgtgctgcacaatgtccaacaggagctatctctgctgaataattcagatatggctgcctggcagccaacatagcccagtaagtatataggcaaaaaagtgggacggatcagatgtaatgtctgatccgtccccttttttgcaacataaacttgtcctaaaaaatcatgttatactccatcttttgttcacttcatgctatccttccagcaattttctcaactttccaaccggtgatatcttcacactctcgcgtctgatctgctgctgctgtctgatcaggctgtccagcttgcggtaatgttcttcttctttctgctctttcagatgaaacaacgtttccatctcgccaagtacattctttgtaactgtatgactgacttcctgcgcaagcttcgtattattctccacgataactttctgaagtgcctccccgataaagctctgaacttgcaaaaacttgtccgtatccaccacttccggctgtgccttgacaagctgtccttctgtctgactcattctgctgttctccctttcctccatctctgccagctttttcttcttctgttcccgcgctttctttaattctggtatgacggtctttaactctctcaactgcatgctctgctctttgagatccttgatgcagtgaaataaacggatgtcatcttctgtatagtaacggtgccccatctctgtcctgccgatcggaaggtcaagttcttcctcccagtatctcagcacatgtgcctccaccccgactctctttgcagcttctgaaatcatatagtgaacttcgcccataaaaataacctccaatatgtaataacctataaagattataacatattgaaggtctgttcttttgctctttccatcgcaagtttcgccattattcctgctttctcgtcgcattggcaaacttcgtataatttggaagccatgcaagattcacagttccgatcggaccgtttctctgtttcgcaatgatgatctctgcaatgttcttcatatctgtatctttgttataataatcatcacggtaaataaacatcaccacgtcggcatcctgctcgattgcaccagattctcgaaggtctgacatcatcggacgatgatccggcctctgctctacggcacggctcagctgagaaagtgcaataaccggtacattcagctctctggcaagtcctttcaatgatctggaaatatccgagatctcctgctgtctggattctgcacgtccgcctacacgtccggtcatcaactgcaaatagtcgatgatgatcaggtctaacccttgctccaacttaaactttctgcacttagagcggagttctgaaatagagatgcccggcgtatcatcaatgatcatcttagactttccaatcactccagctccttcaatcagcttctcccaatcggaatccttcagattaccggtacggagcagctgtgcatctacctgagactccaaagaaaacaaacggttcaccaactgttccttggacatctcaagactgaagattgccaccgtcttattgctgcgaaatgccacatgctgtgcgatattaagcacgaacgctgtctttcccatagacggtctcgctgccacgaggatcagatcagacggctgcaggccggatgttttataatcaagatcaatgaaccctgtcggaattccggtgacggttcccttcgtcttggaagacttctcgatcttatctaacgcatttaagacgacctgcttgatcggaacatagtctccggtatttctcttctgtacaagctcaaatactctcttctccgtcgtctcaagcaccgcctccagcgaatcccgaccgagataacacatgttctcaatctcctcattcagcttgatcagtttccgcagcatcgatttttccatgacgatctctgcataatattttacattcgcagaagtcggaactgctgtcagaagatctcttgcaaattcaaggctggtgatttccggcggaacatccttttctttcagacgctcctgaagggtgatcagatcgaccggcttcccttcattgaaaagttccaccatagcctcaaacagaatgccatatgccgtctggtaaaaatcctcccggctgacgatttctgccgctgtcatgatcgcatccttgtccatcagcattgcgccgacaacggattgctccgcctcgaggctgtgcggaaggactctcttgatcaatgcctcttccatgcgttccacctacgcttctgtgacaacgactttcagatctgctgtcacctttgtgtgaagttttacctgaacgatatgtgttcccaatgtcttgattgcttcttttaactgaattttcttcttgtcaatatcatatcccatttgctctttgactgcatgtgccacttcttttgaagaaacagatccgaaagttctgccgccttctccaactttgatctgcagtgtcacttttcctgctgcaatcttctctgcgagtgctttggcagcctctaactgctcctgcgcaatcttttcttcgttcgctttctgaagcttcaggtcatttaaattctttccagttgcttcgagacctaatttcttcggcaagataaagtttcttgcgtacccgtcattgacgtttacgatctctccctttttcccaagtgcctttacatcttctaataaaattactttcattatatatctcctccttctatcatctcgtccagtgtgcctttgatcatcccaatgacttcctcgacttccatatcggaaaactgtgctcctgctacgttgatatggccgcctccgccgagacgttctgcgatcacctgaacatttacctcatcaatggcgcgggcgctcaaatacaccttcccattgtatgctgtcaatacaaacgatgcacggatccccgcaatgttgagcagctcattcgccgcctgggctccgacgatcgtcggactttcaattcctttgcccggacactccgcaatagcaaattcacctctgtatacctctgctctgcgcaccgtctccgcctttgcacgatacgaatccatatcatcccggaacatctttctcacccgggtgatatctgcaccacagcgcctcaaaaatgctgccgcctcaaaggttctgacaccggtccggctcacaaagttatttgtatcgatcatgattcccgcatacatacagtctgcttccaccgccttgatccggatatcatccgcaatgtactgcagcacttctgcgaccatctcacaggtggaagatgcatacggttcaatataagataatactgcattatcaatgctgttgcttccctgccggtgatgatcgagcacgacgatcgtctttgtcatgccaagcagttcctcacactctgtcagttccggcttatttgtgtcgactacaacaaccatcgtattttccgttaccacatcctccacctgagaggaagtaagaaacagatcttcatcgtatgccgcattatcccggatacgctcatacagcggtctgacagaacttgtgatatcgttgatcacgatatgtactttcttctccataattgtagctgcacgataaataccgattgccgctccaaaagaatctacatccccgatcttatgtcccatgacaatgactttgtccttcgcggcaataaactcccgcagagcctctgccttgactcgcgccttcacacgtgtattctttgccacctgttcgcgctttccgccaaaatacgtaatattgttcgcatcctttacaaccgcctggtcaccccctcttgcaagtgcaagatcgattgccacccgggcatagttgtaactctgtgcataagtgtcggtactcatcccaagaccgatactgagtgtcgccggcatctcatttccaatgctaatgcccttgacctcctctaacaatgcaaacttatcttctttcaactgttggaaatactttttcttaatcacgataaagtatttatccttctccattttcttgacgatcccgtcaatctttgcaatatactgattaatcttccggtcgatcaacgctaccaaaagtgactgtctgacttcctcaacactctcgatgacttcatcaaagttgtcaatgtagatcagacctgctaccatcttctgtgcatcattttcgtgaatgtacttattcagttctgtgacatccttcaggtagattgcaataaagtattccttctccttgggaagctgcaaaagttcctctgtctcactaaatccttccacagatactttgtgcatagctactgaatattccttctccttgtaaataacattcagctgcacctgctcagattccgcttttggaaatacgccccggttcagttccgggatgaccttattaatatacttctctgccttgtcgccctgccctgtcactactttgaaactgtcattcatccatataatctgcccatcatccatcagaagtgcatacggaatggaaagttccttcagcagtgtattctgaacaacaccatactgtgctgcgaactgtaccaggtctgccatgatcagcgacttactgtacatatagagcacacctactccgattccatacactgtcacaatgattgccatcatgattcctgcctgactgctcgtaaaaaagatccagatggtcatcgctacgagcaggatcagcataaagatcggccactgcatgtaaaagcggagctgtccttttaatcgaatatccttcttcatattttaaccctcaatagaactaaagttaccgttaaattataccacttttccccccgatatggaagtaccaatccttggacagacaatctgcttcctaaaatgctcgaaccaaaaaaaagagagaatccaatccctctgtaaccagagcttgtcttctctctttctctctatgagattctcatatctttttatgcttcatatccgtttggattgtttgactgccatctccatgagtcttcgcacatctcatcgagtcctctctcagcttcccatccaagctcttcttttgcttttgcagggtctgcgtagcaagttgcaatatctccggctctacgcggtttgatctcatatttgatctcttttccgcatgctttgctgaatgcttttaccatatccagaacagaatatccatttcctgttccaagattgtagatgcatacaccggctttctcttcaatcttcttcaatgctttcacatgaccaagtgcaaggtctacgacatggatatagtcgcgcacacctgttccgtcatgtgtatcatagtcatctccgaatactccgagacactctaacttcccaactgccacctgtgtaatataaggcattaagttgttcgggattcccttcgggttctctccgattgttccgctcttatgtgctcctaccggattaaagtaacggagtaatacgacattccattccggatctgctgtatgtaaatctgtgaggatctgctctaacattgacttcgaccagccgtatgggtttgtacactgtcctttcgggcattcttctgtgatcggtacaaatgccggatctccatatactgttgcagaagaactgaagataatgttcttcactcccgcatttctcattgcatcgcagagtaccagtgttcctgcaatgttgttgtcataatactctaatggttttacaacagattctccaactgcttttaatcctgcgaaatgaatgactgcatcgatatcttctttctcaaatatattctttaacgcctctgcatcgcggatatctgcctcataaaatgggattggttttccgacgatcttctcaacacgttttaaagattccttgctggaattacataagttatctaatacaacaacgtcatatcctgcattcactaattcgatgcatgtatggcttccgatatatccggctccgcctgttactaaaattgccatgttcgtatcctcctgttttttacgatttgtagggtaacatgagaaatctctctcttcttctattataataccgtactgcgggcagtacaactattttttatattttttgttttaaaacattttttctgttttaaacttatttctcacaaattctttcaaatcttctctacggatttcccacacactctcaagaaacattcttacttaaacattatatttcctgatgatctcctgcatgatatcccattttgcttccatatcttccacaagcttaaactgtgtacggcagcggtcaagattgtgatgttctctgtggatcttaaagtaatgatccccttcaagataatctgttaagaaacgcataccacattcaaatgtcataacctttgctcccattggcatcaactcgatctctttctttgtaagttttccgccacatccttcgatgtatcctttcgcatacagatcaaataattccatatcgcaggacactttgctcaaatcgatttcatcttctgctcctgtacttgctccaaaacggatagaatccccaaagtcattcattgcaagtcccggcataactgtatcaaggtcgatcacacagattccttttccagtcttatcgtcgatcataatgttatttaattttgtatcattgtgtgtcacacgaagtggaagttctcctgccgcaagcatatctccaaatacgttagctacatcttcatgtgccagaacaaaatcaatctctttctgaacagaagctgcacgtccgcacacatctgcttccactgcttttttgaacacttcaaaacgtgcctttgtatcatggaatcctttgatcgtctcgtgaagagtctctgccggatagtctgcaagcaatctctggaagttaccgaaagatactgcgctctgatagaaatcatctggtttttctacctggtcatagctggtcgctccatcgatgaatttgtagcatctccagtagtccccttgagaatccacatagtacggtctgtttgcaactgtgcgaatgatatttaatgtctctctctccggatctccaccgttttcaatgatcttcttacgaaggtaagaagtaacaccgagtacgttctccatcaattcttccggctgtgtaaaaatttctttgttcatgcgctgtaagattacacgcagaagtcccataccggagatatcgaatgtcagaaggaatgtatcattgatatgtccacttccatatggacgctcatcgatcagaaccccttcaaatctaaaatttgcaattgcttcgtctttttgtctgtttgataccattcccatgatcttactcttctccccacaatttttccggatataatccattttctttcatctgtttgatcgcagctactacaactggcttatcttctttataagttactccataccatttatctgcagatgtcagtacggatacagttgcgcggtcttcttccagcagattgctgacaactgtcggaaggaagtattcacatttcagagggttcgtctttaatccttcctctaagaaagaagcaaatccatttttgatctcctgcagaatgcttgctgtgaatccccacatattcatagacacaatgcttcccttcggaagatctgtccaggttgctccctcatcttctgtataggcagcaccgtcaccttttttctcgattcttgtccgctcttctacttttacaagctcgcctgcctcatttgtcgtacataccccgcgggctacatgtccgttctctgtcaatgtattttccagctgatatccgaccattgtataacggaacttgtcatcatcctcatgagtagaaaggaagtcatagattttctggaatgcatctcttccatagtagtcatctgcattgattaccgcaaatggtccgtccacttcatcgatacagcttaatacggcatgtgcagttccccaaggtttcacacgtccttccggcacttcaaatccttccggaatgttgtgaagatcctggaatacataagcaacatccatcacttcttccatacgttttccgactgcttctttaaaatctgcctcattttcttttttgatgataaatacaactttctcaaatcctgctctctttgcatcgaagatagagaaatccataataatatgtccctgctcatctactgggtcaatctgttttaatccgccgtaacgacttcccattccggctgccataattactaatactggttttttcattttgaactacctcctgttcatctatcacttctgttttgtattatctactattctacctgatgttttttaaaaaatctttagtcaatttctttctatgtttgcacaatcgtctcctttcaaggtctatgcctttctttccttttatataatcttcttacattaatataactcatattttaaaaaaaaggaatgcagttcctccaaaaaaaatatgccggaatccgttcttagattccagcatattctcttctatttgtatctgtggttatatacgaacaaaagtgtcagaagtccgatcaatccgatgacctccatcgcaagtccggatacagaaatatgtctctgaccaacgatgatcatagcaaggaaaataacaaatgcaacacacatgataatatttcttactgtactactattcattgccagtccctcctaacctttcagtccgccgagagtcataccctctgtcagacgtttctgtaccatgatgtataagatcaatgtcggcagcataacaatcacaagtccggcatacataataccgtagttggtagctgtcttttccactgccatcagatttttcagtcccatcgccagcgtatcatttccatccatcaatgtataggcaatgatatactcattccagaatgacaagaagttaaataaaatcactgtgatgatacttggttttgccataggcaccatgatctttgtcatcgtcttaaagtatccgcatccgtcaatatatgccgcttcctcaaatcctttcggcaatgtccggaaatatccgctcaaaagatacactgtaaatggcagtgcactcgatgcatagacaagcgccaggataaacctgttattcaggaagaaatctaccccgagcaatttatttgcatcactgagcatcaggaagatcggtactacaatgtaactgatgttgacgaaaagtcctgccataaatgcaatgttcagaatctttttccctctgaagttaaatcttgacagtgcataagatgccggaagtgcaagaagtaacaggaggatcaatgctgttgcagtaacgatcacagaatttaagaaaaacgttcccatgttcgcatcgcggaatgccacaacaaagttctgtacaaaaaattctttcggaagtgcccacggacttacatctcccccgataaactctgagttcttcttcaaacttgccatgaatacccatgctaccggaataatgatagaaattgccagtgcaagaagagctacatagatgaacagcttataaatataactgcttggttttttatgtttattaattttttccatatctgctctcctttcctaaaattcataaacttctctgtctgtgatcttatttacaattcctgccagaataaatgagaacaggaagatcacaacaccgatcgccataccatatccataagaaccgtttgtgtatgcctgcttatacatatagttcagcgccacttctgtatttccattcggtcctccgtttgtcataatttggacaaacaggaagcttaagttgatcgtactgatgatgtagaatgtcaatgtagtacgaatattgctccagatcagagggaatgtaatcttgaaaaacatctggatctctgtcgctccatccagagatgccgcctcataataatccggtggaatcgctgccatacttgccatatacattaccatgtagtatccaattgcctgccagatcagcgcaaagattacagaatagatcacaatattcggctctgccatccactgacgtgccagtccatcaagatgaatcgctttcaggaatgtattgagaagacctgtactcgggttataaatcgctccaaagatacccgcaataacaacgatggataaaatattcggaatgtaaaaaataacacgaaaaaaattctttcccttaaaagttcctctgtttaacaatgctgcaaataatacagcaagaatgatcgtacagatcattactaacacaataatcaatattgtattctgcattgcctgaaggaaattcttatcccccagcagtgttttaaagttctccagtcctatgaatgtctgtttgttcgtaattcctcccatgcggtataaggacatccgaaatacattgattgtaggaatgaaaataaagagaaccatcaagattactgccggtgccagacatgcaaagacaaatcttctttctgatcgttttctgttcataagcttatctttctccttaaaaaacggtgagccctgataactcaccgttctgattaactataacttatctggataattattctacgttttctaataatttctcccatgcatctaccagttgtttctggtactgatctgctgtcatctctcctgtattcagagcatcgatcgcaccataaaccgttgctttcatatcaaatccatcaattggttttgttgtagcccatgtacctgcaactgcttcgtatccgtcagaagatgccagtgtataagtatctttgattgttccatcttccagcttgtctgatgcaccaagaaccggtgatacgattggagctgctgattcttcatttgtctctttgttcactactttgttgttgagcattaaatcaacaactgtatcagagtacatgaattttataaattcttttgcaagatccatattttctgcatctgcaggaatccacatctgctctgtgaatgtgtagatgtagttatcttcatctgcattgaacttcggaggtgccatcattccccagttgaatccttccggagtagagtttgccatctccccgattacccagttaccatttggcataaataatgcttttccgtcgatcacgttctgctgattgatcttgaatccaccgtctgagtttgcatttgcaactgtatctgcctggatataatctggtgaagcaagttttgcgattgtatcaacaactttctttccttcttcagatgtccatgtcttttcatcgtagtttacagctttgttgtagaaatcaattccacctgcctgtgctaacatctgatacattgttgcgtcgaagtatcctgattgtggatatgtaaataaagaaattccgtcagcttttgctttgtctccaagtgcaaagaactcatcccatgttgtcggaaggtcgtatttcttatttgctccttcaaataagtctttgttataccataatcctgttggtgtataaatgatcggagcaaggtaaacttttccgtcaccgtatggctgtgccgcagcattctctgtaataccacctactaatttaccttttaactcatcatcaaatacgtctgagatgtcagcgattgctttttcttttaacatggtctctacgaatccgctctcctgacctaagttgtaatatacaacatctggaacatttccgttcttaaagtctttctgcaaatctttatcaagctcagaagaaaggtgtaattctacgtctacatctttgtgttcttcctcaaatgctttttcgatatttttccagatctcagctccatttccaccttcaaatgcagcaaatttcaggactgtctttccatcttctttcttgccttctgctttttcctctttacttccgcatcctgcaagcatagtagcagccattgcaactgtaagtaaaagcgctgttacttttttcattttcataaccgaactcctccttttgtttatttcgttcactttatacactatattctacactacatccgtcattttttctatattaatgttgttctcatttttatgtatattgctctcaaagctaaaaatatgaaattaataaaaaactcttccttgcttttctttttcccagtgtttatgattgtatcaaaagctgcctgcattggtaaccgaaaaatatgtaataatatgaaaggaaaaaatgatgaaacaaccaaacattttacttcttatgtgtgaccagtttcgtggagactgtctttcctatgccggacatccggacgtcaagacaccttaccttgacacgctcgcttctgatggtgccttttttgaccgcgcctattcctcctgtccaagctgtatccctgcaagagctgcgctttttaccgggaaaagtcaagggcaccacggacgtgtcggatatgaggatggtattgactggaactacgatcacatgctcgcagaagagttcagtacacacggataccagacacagtgtgttggaaagatgcatgtacatccggtgagaaaacattgcgggttccaaggactgcgtctgcacgatggctatcttggatattaccgggatgcctccattccgcattttcagcaccagacggtgactgatgactatctttatgatttaaaaaacgctctcggatcccatgcggatttcaatgccagcggaccggaatgcaactcctgggtgacccacccgtggatctatgaagaacggctgcatccgacaaactgggtgacggaagaaagtatccgcttcttagaaacacgtgatcgcaccagaccatttttcctgatgagctcctatgtccgtccgcaccagccttttgatgcgccggcatcctacttcgatctgtacaaagacaaagaacttagggcacctgcctgcggcgactgggatgacaccgcaagtaccgaacagttcggatataggaaagactctatctacggctgcaacgatgccgaacagcaacacaatgcaatggcgggatactatgcctgcatcacacatgtcgaccaccagatcggacggcttctctctgcactgatggaaagcggagaatatgacaacactgtgattctcttcttgtccgatcacggggaactactctttgatcatcacctgtaccgaaaagtatttgcctacgaaggaagcacacatatcccacttctgttccacgtcggcaaaaatgtatgcccttccaaaccgattcgcagcaatacgatcacagaactgcgcgatatccttccaacactcctcgattttgcaggtatcccggttccagagggtgtggacggcttctctctgatgccagagattgtcggaaagccgaaagaagagcaaaacaaccgcgagtatctgcacggagaacacagcttccactccggtctgtccagtcattttatcgtgacggagactgataaatatatttggtacagcgagaaaaatactgaacagtactttgatctgagaaaagatccgcgggaagaacacaatgcaatcgccgatgaagcatatcaggctcggatcgcctatcttcgcgctcttctgattcaagaactcgatggccgcgaagaggggtacagcgacggagtctcactccaaagcggctgtacaccggtcgcaaatttatctcatattctataagaattcagctggaaatcttgatttccagctgtgttctgctacttttaaaaaataatcacagagtctttcaaagtgtctgtgcgatcctgaacaatgtcggatatgcctccatcagaaattctctgtgaccacaccactcttctgtgagataggttccattctgtctcttgcagccaccgcggcagattttccagaatggacatgtctcacagattttttttatctgtctttcttcctgaataaagtttttcatcgcttcactatataaaagttcctgaagtgtctgatcttgcagatttccgcagcaatactgatccaacacataaaaatcacacggatatacactgccgtctgcctccaccacaagctgcgctgtacagaatccaagcattccacactgttgcggagggcgatcagacaacatcaacagcaaattatcaaacagagtcacactcatgtaatctccatgcacataatcatccagccagagacgatagaaccgcttataaaattcggcgtactgttctggctttagttcctgatcatttccagtcactacgctctgttgctgttctgggaattctccaagacacggaatacactgcacataagaaaatccctgatctttcaagaaatgataatatgcttccggatgcgccgcaagccgtggtgtcagtacagtaagaatattatatgccacttcgtattgttccagcagccggattccctgcatgatctgcgcatgcattccctttccctcttgatctacccgaaaacggtttgtgttagattcatacccgtccaacgaaacacccacgagaaagtcttcttctcgaaagaaccgtgcccacgactcatctatccgcgtaccatttgtctgaatggcatatcgtactgtgcgtgccccctttttttcacggacatactctgtaaattgtctataatactccagccccgcaagggtgggctccccaccttgaaatgcgaatgtaatctgtgcatcttcctccgtttctgcaatggcacggtcaatcaatttccgcatgatttccggcttcattttcccactgcatggacgttctctcctattactgatgtcctcatagaagcagtacggacacttcaaattgcatagggatgatgcaggttttactaaaaatgaaagatagttcataatgttttctcctcctcattacacggattatactatctgacagcaagcttgtaaatgacaccgattcgtttattgcttttttcaacaaacatctatataataaacccaaaggagacctattatgagtaatcaaaattatcgcctggaagagaaaaattccaaaaaaatcgatgtccatctgctctatatcacagaagcaaaatatgagcaggactggcacagccttgcacatacgcatcattttaccgaattgttttttattacccacggaaccggaaaatttacaattgagaacgagtgtttcccggtcaaagaaaatgatctgatcattgtcaatccgaatgtttcccacacagaatcaggcggaaccggcactcctctggaatacattgtccttggaatcaacggactgcaatttacggacaaggacgaatttactaattatacgattcataatttctttcactaccgcgaggagctccatttttacctgaaaatgctgctcaaagaggtgcggaaaaaagaagaaaattttgaatccatctgccagaatcttcttgagctgatcatctggaatatcactcgtcagacacagacaacactgtccgttgctccgactaagaagatcacaaaggaatgtcggttcatcgaacagtatctggatgaacatttcaaagaagatatcacacttcagacactcagtgacctgacgtatctgaacaaatattatctggtacatgcatttaaaaattataaaggagtttccccgattaactacctgattgagaagcggatttctgaggcaaaacatctgcttggcactaccaatttcccaattgcaaagattgcttccgtcgtcggtttttcctctcaatcctacttttcgcaggtatttcgaaaagaaaccgggctttctccgaacaaataccgcaagagtatggactcacaaaatgaggcaggaggtttaatatgatgtacaaaggaacacttctgacggacaccatatccatccacgaagtattcaccatccattattttgaatatatgagcgatttctctttcgccggagagtcccacaatttctgggagtttgtcttcgttgacaaaggtgagattgatatttatatggaaagtatccatgcacgtttaaaaaaaggggaggtcgcctttcacaaaccaaatgaatttcacagactacaggcgaccggaagctctgccccgaaccttgtcgttatctctttcgaatgcagtgatgcagtgatgcagttttttgaagggaagatcttctctctcgatgaaaccgaaaagattctgctcggtgaaatcgtcaaagaggcgaagacactgttcaactgtcggctggatgacccttatcttaccgaaatgacaaaatgcgagcagcctccgtttggtgcagaacaatttatccggattcatctggagcattttttgctccatctgcttcgtcgcaaacaggacagtccttcttcgactccaaaagtgatcgcctccaaaggcaattccgaagtgtttaaccgtgtgcttgcttatatggaaaaaaatctctgtctgcacctgacgattgagcagatctgccgcgacaatatgattggccgctcgcagctgcaaaagattttccaacagaagaccggacttggtgtgattgaatatttttccaatatgaaaatcgatgctgcaaagcaaatgatgcgtacagatttaatgaatttcacacagattgccgagaaactgggctattcttccatccactatttttcaaggcagttcaagaaaatcaccggcatgacaccgtccgaatatgtctcgtctatcaaagcactttcagaagtctaagcatgaggctttgagtaaaacttagtaaaaatcacaaaacttcttatatagaaaagaacctccgcaggtcagctgtcatatgctttccccccggaggttttttctattaaagattttactagatttcgtaccagataatttcatttgcatccagatgaagatcgaaactgcttccatctcctctgtatactgttgtatcctgtggctcataagtattatttactacacagtattttccattcttcacatatgcgtgcacttccacgttgaagtttgtgctgaaccatttgtgaaggtttccttcgtcatgtgcagaccaaaggatggaacgatacagaagacggctgttctcgaaactgtatggaagcccgctgatgtaaacacaacgtcctgctccaaagtcattgactgccatctgcacttctttgtcaatctgtcttaatactgttgttccgtctagtgcaaaaatatttttctgaccttccccaaagtcgatgtcctttgtgcagtcctctttgatgaagtggtcatgttcttcccaattgtatttatctgtatttaagttaaatccattttctttttctacaccgagtgcgcttgcaagctggaagtaacgtccttcccactgataagctgtcggctcaccaacaccgataaatccaccgccattgtagataaatctcttcactgctgtcacgatctcttcatccgcccatgcagctccaccactgtgtgcagtgtaagctcctccgacattaatgataacatcgatatcgtcaaggactgccggattcgtcttaatatcatcaaagctgataaaacgcacatcaaacggcgctccggaaagcgtctccacaattcctgcgtaagagtagttctgcttctgatataaagcatgatgtaccatgtgatttccccatgctctcatcttaccccagctgttgagtactgcaactgtcttcacacaatatggtgttgttcctttgatattttcatataatgtacggaattctttacatacactttctacataatcgataaattccggaaattccagtgcaagctttaagtaaccgccgtatccgattcgatcgatcggttttctaaggattgcacgtcttgctgttacccagttcaccttcgcctctttgaccggatctccgccttcgtggaaagtatctgggaagaaatatgggaggaaacgtccctcagtatatttcacatttggaatatcgctgatcagacggagtgtagaaccatttccgacacttcctacaactgcatccagtccgatggatttgaattcgtccataaacggctccataccgatccagtggtctcctaagaacatcattgcttcttttcccatctcgtgcgtgatatccaccatctctttggcaagttttgcaacttctcttctctgaaatgcctggaaatccttgaattcttttgacggaatccggtactgattgttcatatatccctgatcaataatatactctggtctgaatttgtatcccacttccttctcgaactgctctaaaatatacgggctgacagatgcagaatatccgtaccagtctacatatttttctcttgccagttcatcgaagatcagtgtgaactgatggaagaatgttgtatatcgaatgacatctacatgtggattgtcctcgataaacttgcggagacgtttcatggaaaattcttttgtcttaggctgacgcacatcaaaagtaatctgcttctccacacctttccagtcattgacaactgcgttgtacatatgtaccggatcccacataatgtatgcaaggaagcttacggtgtaatcatggaatgcctttgctccatgaatcgtcacatcaccagtctcttcactgtaagaccaactatctgtcggaacaacttcccctgtagtacggtcgattacttcccaccagcgcttaatgtcgtcatgagaatttaccttcagcatatccggatataaatgatccatcaaatgaatcgaaagctcttcctccactgctgtatggaaagaagtcataatatacatctgctgaatctcatccgggttcgcctttgcccactcattatcttttcttgttgtatagtaagtagaatacacttttgcatctacatctcttaatccttccggatagtctgttccatcacagtcacgtatcgcatctgctccccagcgctccagtaattccagtgtctctggtacaacatcaacatctgtcgggatcgttacccttcctcttgtgttttcattacccataatgtttctccttttctaagaaattcgcatttttctaaatctagtataacttcttctcataagcaaatctacgcaaatcttgtttacaatattataaatattgctatatccttacattttaacaattttcttctcttttcccataatccccggtcaaatctccactccaaaatactctcctgccaaaatacttttaagtactaccgctgtcttttccagattcatcctggaattgtctttgtttcccatctttcttatggtagaataaattacagaaacaagtgccaaatccactgtaaaaattgggagtttccaatgaatttctatcgaataaaaagacagccagtttttcaaaaatctgatctacagacttttgaaatcccgactgtcttttctctcttttcccgaatcacatcgccgctaagcaagcaatttactcgaatagaaattctacaaatgctttcgcatgttctcgatgttccgtgtaagaaaatactccgatatacgcatcttcatacccgacgattccatattcctctgcgagtttactttggttggcaagcatataattttctccaacctcctctgcatgttcttcgcaaaattcacttcccattaactcttctacacttaaaaaaacaccatcctgatcgtatgttgcaaatgtttctttatcacaaacaaaaatatccgcggttcttgcccccattacaacagatagcttcatcgtactgttatatgtcgtctgatttccttctccggtatagacggaagtatcgatcgtgataatctgattcttgtctttgattttcagtgctttccgcaaatcttgatttaaattttctgtactcggcgcagaagaattgacgattaccacatttaatagctcttctttctgcaagttcttgtaccagtttaccccaaacactccgagtgcaatcactgccactgccaccacaagtacccatttgtaataagtgaagaaatattcgattcgcttcttccagctcatcgaagctactttttccctctctaactgccacttctctttccttgtcagatcagactcatgtttcttttgcatcattcatttccctgccttaccttatttcagaacataattcaaagcaagttcgaatgtctgtttcatgccgtctttgtgtgttctctcatatccatgtgaagcatatactccttgtccgatcaatgcatatcttacatccttaccagatctaagcgctgctcctgcgtcggatccataagatggataaatatcaactgcataatcgattccatgttcctttgccacttcgatcagctcatttgtcatttcaaaatgatatgctccggaactgtcttttgcacagatggatacttgtttttccgtacatgccagatgatccccgacacatcccatatccactgccagaagatcttcaatctcctctgggattcctgctgacgccccatgtccaatctcttcaaatgtcgtaaaaaacagctgtacatttctcttcagacatcccggatgctcgctcacatattttgcgattccaagaagaactcccgaagaagccttatcatccagaaaacggctcttaatatatcctttttctgtcacttgaaatcttggttctaccgcaagaaaatctccggcacaaatgcccaatttctctacgtcttccttggaagtgacatcttcatcaagaactacttccagatttgtaaatttacgctctgcgttgacatctggatttacatgcacagaagcattctcaagctggattgttccctcatacaccgcaccacttcttgtaatgacacgcacattttctgtctcaatattatttgggttcaatgttccattggaaattgcaagacgtccattccctttaatataatgtacaaatgcgcctaacgtatctacatgtgcaagcatcatcaacggattcccctctccgccaagatttgcaattacaccgccttttctcagcgtacgaacttcaaaccccatcgcctgtattgtatctacaagatatttctgtacattgtaatgataacctgtcgggctgtcgatcccgatcactttctcagtctgttccacgatgtattcgtgatattcatgattctgatgtgccataataaaatccctccattatttttacaatacaagtattataacaaatgggaagagcattgactagagttgtttgcaaatatccttctattcatttttacttcctctatacgctggcagacaaaaaaatattccaaacatttagaaacgcagctttctgttctacgcttccaaattattcggaatatcttttttattttttaatatgacttgcaaccatcatcgcaatcttaaatgtaagtgcatcatcaaacacacgcacatccagccctgtcgatttctgaatcttttccaaacggtacacaagtgtatttctgtgaatatataattgccttgctgtctccgatacgttcagattattatcaaagaacttatacacggtaaccaaagtttcctcatcaaactgctcaaaagcgtctccgttaaatacttcctgcagaaacatctcgcacagtgagaccggaagctggtggatcagcctcccgattccaagctcattgtatgccagtatcgttcgttcactgtaaaaaattcttcccacatccagcgccattgcagcctctttataagacttagaaacatcttttaactcttccaccacagttccataggcaacacgcactttcatcatcgcctcagcgctcaatgtatcggtgatcgtctttgcaatatcattgatctccttatacccgtctgtcacctcgagatgtttgataaaaataatatgtccttcatccaccgccgtaatgaaatcctttgttcccgtcgcatagagcccgcgcattgtctccataacaatgctgtctccttcttttttaggctcaatcaggaaaacaactctccgttcctcgattgcaattccgagcttctttgctctattataaatatctaccagaagaaaattgtcaagaagaagattttgcagaaaattattcttatccatccgttcatgataagccatgatcaaatttctgatctgacttacacacagccggccgatcacctttatgtcatcccaaactccatggatcatcagaacatattccaattcactcatatggttcaagattggaaaaaatgctgccttctcctcaaccgcctctgagagttcttctgcgtcttcctccatctgctctttccatttggaaagatagattttgacttgctccttggcgctctcatctgcccctgacgttttcacagcaatcattccttctgcattccataaagatatttctgctgccacaatttctttcatctcattgatcgttctctgtaatatctgtcttgataacaacttgccacttcctctgtcgtttcctaattataatctctttaataattcttcacgttctttttcaaacccaggttttccaagaagcgcaaacatgtttttcttatagctttctacgcccggttggtcaaatggattcactcctaataaatatccgctcacaccgcaggcaaattcaaagaaatagaataactgtccgagataaaattcattctgctccggaatatgtaccatcaagtttggaacatttccatctgtatgagcaagaattgttccattcatcgcactcttattgataaagtccacagactttcctgccaaataatttaatccgtcaagatccaccggctcttcgttgatcaaaatctcttcttttgcagtttccacatctaaaacggtctcaaataaaattcggcttccatcctgaatgaactgtcccatagaatgtaagtctgttgtcaggtctactgctgccgggaaaattcctttttggtcttttccttcgctctccccgtaaagttgtttccaccactctgaaacatagtgaaggcttggctcataatttgctacgatttcaactgcttttcctttgcgaagtaaaatattacggattgccgcatactgtaacgcactgttttctgagaactccgcttccagagcctcttttcttgctgcctgtgcaccttccatcagcttttcaatatcagctccactaactgcgatcggaagaagacctactgctgtcagaacagagaaacgtcctccaacatcatccggaacaacaaatgtctcatatccttcttctgttgcaaggttctttaaggctcctctcgccttatctgtagttgcatagattctctttcctgcctcttcttttccgtatttcttctcaagtaattccttgaatactctaaatgcgattgccggctctgtcgttgttcctgattttgaaatcatattgatcgaaaaatctctgtctccgatcacatcgatcagatgtctgatataagtactgctgatgctgtttccaacataataaatctcaggtgttttgcgcatttccttggaaattacattataaaagctgtgccctaaaaattcatttgcagctcttgctccaagataagaaccaccgattccgatcacaagaagtacttctgaatcgctctgaatctttgctgccgccttttgaatgcgcgcaaattcttctttatcataatctaccggaagatcgatccaaccaagaaaatcatttcctgcccctgatttggacactaatttttctcttgcagctactgccagttcactcatatactctacttcatgtgcattgataaatttgcttgcttttgaatagtcaaatcttactttatttgccatcgttatcctctccttctaaatatgcctcataatcatatttattttatcaaatggtcctctgtttatcaagccaaaaactcctctaagatatcccggatcattgcctcccgtttcaggtcattttccattttatccataacttcctcagattttctctcttcctgctgtgcttccgcaaataattctttctcttttccacctctgttctcccgcatttccatttgagcttgatccacagtctgttcttcagtctttgcctgcgccagattctcctgccgattccactcctccgatgggttaccgtctacctgctgagcggattgcacttcttccttgtctccccgcatttcctgcctcgctactttttgataccggtgtgcacatacattttgaagataatccaccatgtagacatgaagcatttccactttatatttttcatccgttgcctgacaaatcaaaaacagaagtaccatttcaatcgctccaaacgcaccataccgaaatgcctgctctcccattccataaatactgtaactaagcaatgcccctatgagccccaaaatcccgacaaatctcatcgactgccgctccagctgctgccatgtatgcagccgcaaacctacagaccgatattcatgaataaatttttctacaaatgcacctacattgtccaccttgtcactgaccatacatgcatgttcaaatttcgcacgaacaagcttcataaaacgatgactgctctttgacatattttctgcagccttcaccaaactccgaagtgtcccttccgaaaccagtttactgagtatcccaattcctccgatcacccccattagataaaaaatcatctgtgtgtctaacattgtcttgaacataaaagagtccctccttcttctttcttctcattactgattctgcgttcattatagaccaggaatgtccgaagaaaaagaggagcgactcttgaatcgttcatcaaaattcgacagaatcgtttttcttttcccattctgtcttttgcttttttcttataaacgtggaagcagattttgtacaagccttacagaatgctcgattgccttctgctcaaatgccggataatccatctccgcactgttgtcggctttgtccgaaattgctcgaagaatgacacacggaattttgttcaaatatgccgcatgcgcgatggacgcaccttccatttccacacaatctgcgccaaatcgctcagtaatcctctgctttacttccgattctgcgataaactgatctccactggcgattcgccctgtaaatgtatgaatatctggatttgcttcttcatttgcttctttcgcaagctttgcaagtctttcatctgccggaaatgccaggacatccatgtttggaacctgaccaaccggatccccaaatgtggatgcatccacatcatgttgtaccgcatctttggaaatcacaatatcaccaatatcaatagctgcatttaaagatcctgcaattcccgtattgatcaaaagatctactccaaatctatctacaagaatctgtgcacagattgctgcatttaccttcccgattccactccgcacaacaacaacttccttgccgcaaagcattcctttgcagaaagtcatagaagccttctccaccacttcactaatctccatctgctctttcagaattgctacttccttttccatcgcaccgataattcctatgatcatctcttttcctcctgtttgtatcattttgtttctcaattatagcaaagatttgctccaatacctagtgtcctggcacatttattttcagatgggcatgttatctggcgcaaatccttcaacagactggtattttttttgcccttttgctataataaaaaagaaatattgaatctaaatgaaagtgaggtgctatcatggaatacaaaacacacggtgtctgtgccagagaaattaaatttgacttagacggagatactatcaaatccgtagaatttgttggaggctgctccggcaatacacagggagttgcccgtctcgtagaaggtatgaaggtagacgatgccatcgcacgcatggaaggaatccgctgtggtgcaaaatctacatcctgtccagaccagcttgcacaagcattaaaagaagctactggaaaataaaaaacaacagagacaaacatacaatctttcaagtcttcatgcagtttgtctctttctacttttactcattttacaaagggaccatctcagtctctgcatcccaatatgtagtatttaccttattattttggttttttagtgtggcgttttctattggaaaatgacaggtttttgcaggtatgaaaatcattccccaaacataccggatgcagagactgagatagtccctttgctttaactctattcagttttcttatgacaagtttgtaattccattatggatacgtaaatccataaatcacatactagttacaaattagcccatccaaattccatttgtgaaagaatttcctacatctgtgttggcggaatgaattcctctggcgcggtaataataacctcttggaattgtcaaatttttactagtgcttacagtataggtatttactgctgattctctccaagaatatacctgactccaagctccattattatattgttccacaataacagcaacttgtactttatcaactaccatctgagcaactgtatctccaccagcaactaccttccctactcctgcatttccaataacagtcgaaccgtcttgcagatacctacctctcatttctatgaaaccctctgcactactgttttttgtcaaacttgaaacagtatcttgagccaacgcattccctggaatgcttaatgtagccacaagtattcctaatcctaataatatttttttcactttgtttacctccctacatataagtaaacagtcgaacacataaaaacttacgcgtttttaagaaaaaaataaattttttattattttttcgaaatcagctctatccatatgccccattagtttgtaaaaaacctgtttttcttcaaaaaaggcaatatattcttttttatctaagactaccagttctttaattactatttttttctctccgttatccaccgtatactcatctataactttatcttcactattaagacttcttgaaaaatcgtttttttgtacatacatttcatactgaaatactttttgatcatacaagtaaaaaagttttgctacacctacattagtgtctatcgaaaaactatcaaactccatccccgcaggcatatactgtaactgcacaggctcaattcctaattcttctttaatctgttcgtatgcttctttctcgctcacatctgttgtcagaattctatcttcaccttctgtatcaacggtcactgtattctcattccccagcaccagatccgcaactttcaaccagtatggtctgccaccaagacttgtcatgccaatccccaataccaaaaccatcgttgcggcaacaacaaacactgcccttttttttcttggaaaatggaatctttttctcgctttctttgctttcttcttttcctcggccgctctccacctgaagtaagattcccgatcttctttagaaagtttttcacaaaactcttctatactgatcccaatctcctctgactcttcactaggagcatctgtccgattcttttcatattcttttatgctttttgccaatgcttcccgcaatgtgtctggcgcctgaacctcttttaaagattcatttgaaagaacttccttttctatttgttctgcctctttttccatctgcttcttcaaaaactgcttgaatttttcttccatctgccacctctctttctctcaaaaggaattttatttttttatctcatttatatacggcaatagaattttttacatgcactcctcttttctcaaccttcactattttgttttttcttgacattttctcaaatctgtttaatatgattcttagatatagaaaagattcggaggaacatcatgaaacgtattattcttaccggcggaggaactgccggacatgtaacacctaatattgcccttcttccccgtttaaaggaactcgggtatgatattcaatacatcggctcttataatggtatggaaaaagggctgatcgaaccgcttggcatcccatatcatggaatttcatcaggaaagctccgcagatatttcagtttgcagaactttacagacccattccgtgtattaaaaggatttggcgaagcaaaaaaactgatcaaagaactacagccagatgtcattttttccaaaggcggctttgtaaccgttccggttgtaatggctgggaaaaaatgtaaagtcccaacgatcattcatgaatctgatatgaccccgggacttgcaaataaaatttcaattcctgccgccacaaaaatctgctgtaactttccggagacattagaacacctgccaaaagaaaaagcggtcttcaccggctctccgatccgacaggaactcctcacgggaaatgctgatgccgcattaaaattctgtggtctttccgcagaaaaaccagtcattctaatcattggaggaagcctcggctccgttgtcatcaacaatgcagtccgcgagattctgcctgatcttctcaaagattttcatgtgatccacctctgtggaaaaggcaaggtagacgattctctcaagtccttggaaggatatgttcagtttgaatatattaaatccgaattgaaagatttgtttgctctggctgatgtagtgatttctcgtgcgggcgccaatgccatctgtgaactgctcgctctgcataaaccgaatctcctgattccactttctgcaaatgcaagtcgcggagaccagattttgaacgctcgctcttttgaacggcaaggattcagcaaagttctcgaggaagaggaattaaataaatccaccttacttgattctttgcagacattgttccgcgacaaggaatcttatatcaaagcgatgcagcaatccaatcaacaaaattccattgacacaattattgaactgattgaatccgtgtgcaaatagtcggatgctttctaaaacgtcaggggctgtcacaaaatattttcgtgacagtctctttttagatcagcttttcaaattcctctctataattctttgtaatccactttcttgctcggtaaagcatctgatacagagcatttagctctattctcattttcactgcaatgtcttcctgcggtacttcataaatatacgccagcaccactgcctgccaccatctcggatttttctgatatagctgagtaaaaatttctttccgtaacaatgtatgcttttcttcttttgtttttataaacacattctcttctgtactgcgggcagcttccctcatatcacataattctacgatattctcgtctgtaagctcccattttaccttctcattatagttcaacacataattctttgcagttgtaatcagccatgactttatatttcctctttttatttgttcaaactgaatatataactgcataaatgtatattgagaagcttcttctgccacatagtgatctccggagtaattcaacgctgttttgaaaacgagatttacatacttgtcatatgccgtattaaaatctatattctcacttaatttctgactcactcaggtaccccgttctatcttactgttcattcaactttgataaaatttccaatttatcttcctctgtaagtgttccgacattccatcccagcccgacattgtcatttttatatcttggaatcagatgcatatgaaaatgaaaaacagtttgtcccgccaattctccattattctgcacaatattatatccctcacatccaagtacttctgtcagctttgtgatcattctttttgcaagaacgagcgccttggccgcgatctcatcatcaagatgatacaaatctttataatgctcctttggcaaaatcaaagcatgtcctttagatgccggtccaaggtctaaaataaccctgaagtcctcatcttcataaagtgttgccgatggaatctctccatttgctattttacaaaaaatacatttttcatctctcattatttttccttctttcgttttttctatgtcattcctgtctgacttttccgacctctttctgtcgaactttgtcgtcggaatatagttgaatccatgtgactacaatgttacactcgtctcagagaggtgatttgtatgcttaatacaacagattcacaaaagctaaaggttcttgcaaaacaaaatcctgaaatacagatcttgattgaaaaactcatgaaagaatatgagtttatcctttccaaaatgtcgcacgaaattcgtaacccactgacacttgtgtacagttctcttcaattaatggaggcgcaacatccacaacttacaaaaatccggcactggtcagatacacttgaggatgtcaaatatatctgtggacttttggacgaactttcctcctataatcacggcgaacatttgaacctgtctgtctttccattttcggtatttctcagacacatcgcactgtcctttgcactttctcttgaacagacgaacatccaattttgttctgaaatcgcagacaatcttccggatctgatcggagaccagcgaaagcttcaggaagtacttttaaatcttcttcagaatgccaaagatgccatcacagaaaatggccttataagactaaaggccttttgcaatgatcatcacgtgattgtcgaaatcacggatgacggatgcggtcttacttccgaacagattcctaccattttttctccatttacctcctataagacaaatggaaccggacttggactggcaatctgcaaacgaatcattgactcccaccgcggtactctgaccgtctcctcaaagccgggatcgggagctacctttacagtttcgcttcctctttaagctgactgtccctgccatttggatatttcttcttatgatacaatatagctgccagcaaaattccgctgataactccgccaatatgagccgaattatccacacctttacttgtaaagcctaagtagagactacatagaaccataaatgcaagtcctctgctgctgatgtttccaattcgtcctctgtttcgaagcgctacatagaataatgccccaatcaccccaaagattgcccctgacgcccctgcagaaatagcatattcccctgtctgtatgtccatccacgcagacagcagattccccataagtccacttaacagatagactgccaggtatttccattttccgatttctaattccaaattccatccgatcacacccaatatgaacatattgttcatcaaatgctcaaatccaaagtgtagaaacatacttgtaaacaggcgataatattccccatcctcaagcatgctgggtacatacattgccccgtgatgaaacatgaaaattccatcttctgtcattccttgaaaggaaaggacaagaaatattgtgatattgatcacgatcattgctattgtacagactgctttcttttcctgtttcacgctttaccaccatttcattttataaagtcacattaattattagtattaagcaaaaataagtgtgtgtcaagaacctttccggattctttcctaaggaccatatattccagcggctccatcacagcatcccgcattcagtttcttttttattttgcgtacaaaaagagtgagcacatcaaccataaactgctcactcttgtaactattcttaaaattatgccaatgcaacaattacttccacttcacagagaacattctttggaagtgtcttcactgcaacacaggaacgagccggtttgcctgtgaaatattttccgtaaacttcattaaacgctgcaaaatcagacatatcagcaagaaaacaagttgtcttcataacatctgtatagtttgctcctgcctcttccagaacagcaccgatatttttcattacctgctctgcctgttcttgaattgttgttcctgcaatttcacctgtagcaggatcaattggaatctgtcctgaagaaatcatcagatttccaaataccattgcctgagaatatggtccgattgctgccggagccttttctgtactgattacttttaacatagttaaaccctccttcatttcgtagaacttattttctaattttcataataccacttaaggaatgatttctcaacaaaaaatatccattttgcagtagcatccgctttgaatctcccttctctttgtccaaatttcacaagcatctccttcctcctagactgtatcgtcatcccgaaacatctctaattcgtcccattctccccattttttcttttttgaaaaaatcttttttgtatgcttcttccattccacaaaccatccatccttttcccgcagcactatattttctccggcttcccagccagtttcatccaatattccctcctctgtaacataccccttctgctgtgatctcagctgttccatctgctctttccagtctgtttccatcagcatttgaatctgtttcattgagtaattttcctgcatggaaatcttatgcagctcatatgccagaaatacacattctttctcttgatattctgcccggctgacaaaatattctgccagatgccggaactcgttcgtcgtctcttttgcataacgcggcaaaaaacagaaagagaacactcccttttcataataaataaactctggattaaggatcaccttgttttcacttaaaaaatactttttcatttccttcatcacggtcagaagctgatataaaaatgctttcaattcttcatacccaatgggaatcttttcatattttgttttcattgaaactttacaactgatatcgtaatagtactgactgttctccccggctcctctgccacgtacctcaagcagacctggaattttattttcccttagcatatgcatttgataatcctcttcataaatgcccgcctcttcgataagtaagtatgtcttgtcaagatttcttttaacctccgtcttcatgtattcctgcctttctcatatttctgataaatttctccggctctgtcacagccacactctggctcacagaaattttcattctccctttccatgcaatcccttgtacagtaatcttttgatcggtctcctcaatcgtcagattcactgctgaaaataacagcatccttttccttgccgcaatttcaaacgactgctctgcctccgcaatagtacaagcttccggacttctttttttctggctatgcacaactgccgcctcataggcagttcccatcagaatatttttatcatgataataaaacactcctctgataactaaaaaaaagctaagaaaaaatacggaacacgcaaccgccgcctcaatggtcgcacttgctttcatcctcataaaaaaccacccccacatatgctgctgtaagaaaaggaacaaacggaatcctcgtatccctccggaattttttccaaaccagacatcccactgcggcaatactgctgaaaaagaacgcaatgcataccaaggtgacggtatcccagattccgagataaatccccaaaagagtgatgatccatacatctccatatccgacagcttctcttgtgatccagcttattatccccagaactattcccggaacagccccttgaaatagcggaaatagattcagcctggtattccacaaactaatcaaaagaactccgagacttcctgcccacagcagccacatcggaagactcctctttttcaaatctatcgccgcacagactactaaaaataaaaaaatactgattgttcctaccgtccgcatcttgaacacactcctcttccaccgacctctgacagcttcactgcccggatatttctttttagcccactgcacccaagggaagcatgataacgatccccagatgctgtgtaataaatcatcccggatgcagactttgccttgcatttttcacatgggtaatatttcccttgatattcgttcctgagatctgcaacatcggatacgtttcctgcccgaattgctaatttcaaatgtgtacattgataacttttatggtagactgttcctgtttctgtaatatacacatacccttgtttttctatataacttccctgttgataaccattccatcccttgatcctgacccgttctgtctgtgaaatcaaaggaatcccaaaaattctcactggtggctgaattttatattccacaacaatttcgatgattcctgatcccggccacactcttgacttgtgacagtcaatccctccggatttaccagcaatcatactttggcttaaccgtctctgcccaattgctcctacaatatctgactctacttttgatggtaggagcaccggagcaagatagattcgctccgccgctttttttgccgctgtatcggctcccatttttacgctgatcctagtcgcctgcacttccagtaaatagatcagcatcactcctgccaagaaaaacaaaggaattgtaagtgcagcttcaatggtaatcaccgcatgcagttttcgttcttttttcttgtacctatctcccttctgaacaaagaagcttttcacctttttggagatgaatgaaaatgccctttccaagatttgtagtctgtcccggtgagcatgggatatgaaagagtctttctcctttcttaattttatactgtacttttgaataaaaattcgttctgaatttgtgagcctttttgacggaaagggcatttgcattcacctcctagtattatattcttttcttttgttacacaatctgttgcttactcatatccgaagtaagttgaaaactgataattcactcctcttcgaatcttgcacttactttttacctgtaattttgtcacacaatgatccacctgaaaggtctcttcgcccggcttctttttcatctccatctcaatcagatcaagggcgcgcatcgtacagacttgctctgatttcaggaaaaataaaaacatcagatattccttatagcgaagtccaccttcggcatccattccttctttttgatcttctgctgtcccaagcttcagaagccctgaaagctgcaactgccacgtgtcatgagtcttgatcagagcaactcgttttccatctagaagcgctcggatatccatcactgcttcgccaaatgcccatgcaacgagtattgcctgcttgacaagtccggttaacactggaagcacgatcgcagtagacaatgatactgcaagtgtttctgcctctgcctgttttcccgcatcggtcagaagatacagataattggcaccacttctcatcaacagcagcttcttcacaaccgcttctaaattttgctgatcactctcttttccttccaaaatatattccatttcataagaaagtgtattttccttcttctgatccactgcatttccaaaatgctccagaagatactgacagaaaaagagagaagaaatcttaccttgtgcatcactttttgtcgggaatcttccaattcctttttgtaagttacgatgagacggaagtccccctaacgatatttgtttctgtgataactgttccggatttgaaacaacgatctgtaaaagatttgattttttgatattagaaatgttttccagcggattgttttccgaaggaagttcactttctccttcctgaagttttgaatccaactcttgtgagatatcacttccctgttcttcataggatccactttgctgactctgctcttcccataccgcacagtttccagtcagttcctctacaagatcaacacccattctacttttcatatatctgactgcctgctccttgaaaggttgtccatgatcatctgtcagaagctgtagcttttctggttcctgcgtcattcccgctgcctcataaaattccagccggtttacaatattttcaaaagaaaatatcccggtctcatagtcggccgctatgccaaaaatatcatattctgacagaagctctctgtgatactctgcaaatactgactgcagcgctcgatccatatccgctctgcgatagttctttgcagtctgtaccgatgcactctcgatcaccgccccgatcaatccaaccaacaacacaaagaccagactgataaaagctgtcatttctcctctcttcatcttctctgtcactccttaaatccctgagctttcactcgtgatcttctgaaagattgagtttaccagacttgtcagctgtgacttaaaaataattacaagtccgatcaacacgacaaggatcagtatcacttccacaacaccaattcctttttcatctttcaaacatgcaaaaaattgtcggatccgccacataatttcaccccctttcccgcaaaatgtttctcgaaatatctctgctccatcccgtccactctcctcttttctttctcttttttaaaactgcatagacaaaaatgccggcacgattacaatgaccagaaccactgtcaacatgaaaaacatcggtgccagaagctttgtccccacttcttcccctactttttttgccgcacgctttcgctcctcaaatgcattgactgcttccagcctaagaagatctgctaacccttttgatcctcttttcagattttgggaaagcaaagctccaaagcgcatgtaacacacagcctcacaccgttttccaaaatgctcataacattctttctctgaaccccctgcctgcatttctctaagcgtatatgccatttcctcatatgcaaaccgctcctttcccattattttccctttttcataatcagaagagattttctgccatgcagcttttactgtcattccggctccaagaaacaacacaaatttgtttagaatttccggataatctatcatcatctgctttttcttctttttcatttcttccttctgcgtttctttctccagcagaatcagaagaatacttccaaccaatccaagtcctaaaatgacatatcctctgttttcctccggacgtcgccagctgaccggttttccctctaaaatctctggtaattctacctgtttttgttccggatgttccttttctttctctgcaacctgccctgcaagctgagctacgatcttctcatcgccttttaatttaggtggaaacaggttggcgcttctcatatagatccgctcctcttctccatatttcagtttccctgtaatctgaacgattgtcccctcttctttgagcgcctctgtctgcaactctccgagaacattgatcacctcatagttgtctacttcccaggaaacggtaatcggcatatccagaatcctggatgggaaatgcaaatctttccgcacctcatcaaatgtcttatttttgtccaaaataatgccatccaactttttcatcgctgtttcaaatgctttctccaactcctttccattgtactgcctctcaggaagttctatcgtaatcggaatctctcttccacctgtctttgcgatcaacttctctgttcgcactccttccccacagttatttcgctccagtcttgcatgttctcccataaattccgcctgttgatccacataaagcagatacgcggcaagtgaattcacaccgagcagcatcagaaaaatatttctgctgttctttctcatacaccattccggaagctttctcttttgatacaaaataacggcgattgccaatgctataaatattcctatcgaaacaatcatctcacacctcgatttcaatcatcctttttcccatataaaatgcccctgcataaacagccagacagacagtcataacaaaaatcccaagaaaatttctataaagtacctctacaaaatccggaaatgctatcctcatatagaaaataattccaaagggaaccaccgacattacttgaaattctaacttttttgctgacattgtcatctcaatctcgcgtttcacctcaattttctcacagatttgctttaccgcatttcggatcatctcaatgctgtcccctcctgctctctttgctgccacaaagacagatacaaaattcgagacatcctcctgtcctaccctgtctgcaaactctttccagatttgctccaaaggtacattcatattgagctgatgaatcatataagtatattctctcatgatccgtgtatcttttttatagatcaatgacagatcctttgccgtctccttcagtgcattttctgccgaatatccgacattgagcgccgaggacatcgactgcagactcattttaaactgagcacaaaattcctgctgttgtttctttatatattgtttttcccaaatacgaagatagatcaccagaaatggtgagaacatcagaccccctaaaaagaagtcataaaatagatatgcaatccctgataacaacgctaatcctttgaacgctgcctttccataatctgcctttttaatatcctgctgccagtagcttttctttcttttgtaattcatgaacccattttagcctcccttgcacctttccatcttttcttccagtctcttcaaatcgatacagactctgtacctttatctccccctcttcataagcaagcacctctgagatttccaacaccttcctgctcttatcgcgcagccttcccagatggacgacaagatcaattgcggaagcaatctgcctctgtactgcgctcaatggaagatccacacccataagcaccattgtttccagtctactgaacatatcctttgtactgttggcatgtcccgtgctgagtgagccgtcgtgcccggtgttcatcgcctgcaacatgtcaatcgcctcacttccccggacctccccgacaacaatccggtcaggtcgcatgcgaagcgctgacttgatcagatcccggattgagatttcaccagttccctccacatttgcattacgagcctcaagccttacaagattttcaattccccgaatctgaagttcggcattatcctcaattgtgatgacacgctccccagcaggtatatgctgtgcaagcgcatttagcatggacgtctttcctgatccggtccctccactgataaagatgttataccttgctttcactgcctgctccagaaaatcagctgcctcctctgagattgcctcaaacttcctcaaacgttccatcgtcattgcctctttcggaaactttctgatcgtcacaatcggtccgttcagcgcaatcggagcaagtacgacattgacacgggaaccatctggaagccttgcatccacaatcggatttgcctcattcacaattcgattggatcctgcaacaatctgctgcacaacatcttccaacttttgtctcgatgcaaaccgcttctccagtcttgtcacaactcctgctttttccataaagatatgctgcgcaccattgatcataatctccgtgatctcctcatcctcgatcaaatcctgaaggatgtccagctttcggaatgcattaaacaactcctttccaagcatattcatctcctgaagtgacatatagtgttctcttcgttcttccgataatacggtatagatcaactccatcagcgcttcgtcttctatctctctggacagatccaactcctccatgattttctgatataaatgctctgtatctctcataacaattccctcacctccacaaaaattgttctctcaagcacacaatccaaacccattgcagtcagattgtgccgatattgctccagttttctctgtgccgtttcctcttgcacaattggtgtataaatgcaggaacacaattctaatattccatacgttccccgaattgcatccccgatatcaagcactactgtctcataaatacttttctcagcaatctcggtcaaaagttgcttccactcttcttctgtgaccgatttcagatcctgatacatttctatcggtaccagatagtcaaccgcctcctcatgcttcaccaatgtctccagccggatccccatatttttacagccctgcctgagataatacaaaatttctgtaagtcctcctgtctcctcttctccctcctgtctgccagcatatgcctccaagttcaaataaagtgtattccctttctttgcaaattcttttgcaagctgcagtgcatactgtgtctttccgattcgatgtatcggcgagtaaacaccgatcacctccacatctgccttctgtatcctcagaattatctcacttccctcctcctctgcacagcagcttagaatttctgcaataatcttctctccactttgatatttataaattggatgatagcaatctgtttctttacaattccgatcatcacacaacataaatacctgtttaacatccatcgtttctgtctcagcataaatatcatccagaagcagtaggtctactctatgttcatttataaactgtcttagtttctccagatctaaaaagaccatcacttgaaataacagttctcttcttcccaaaatgtactccgacagacctcttgtatactctggctcttgtgtacagattgcaagtatttttcctttcaatgaatcacttccatttctgtttatgtgttttgaagtttcctttttgaatttttgtgttttggatttttccttttgaatttgtaatggaatctggctgtacttactgccagcctcttttgatatgtaatggtcccttgaccatagaatgatatttcatttagaaatgttctgtttgtatgttgtattatatcgacatcttttctttttgtctatatgcatttttagatttgacgctttttgtgaaatactcacaagttttggtagaaaagaatcccgtaaagtaagcagacccccggcaatccaagggttcccgatgtcaaaagggaaaggccattcagccccaccgccactgaaattcctttggatgcgaggatttcatttgtaaagaaaataactcccagaccaacgactgcccggacaataaaatttacaacgatgcttgaacgattttcatccatcttttccttctccagttgttcttatctcatatatatggacttgtctgggagtttatgctctctttattttttggctcttgttcctattttgttccgaaaatacgatctcctgcatccccgagtcccggaacgatatatccatgatcatttaatttctcatctaaagccccaatatagacatccacgtccggatgtgcttcctgaagcttcttcacaccttccggtgccgcaatgatacacataaaacgaatatttttcacacctttatccttcagcatctgaatcgctgcaacgcaggatcctcctgtcgcaagcatcggatctacgacaaatacttctctctccccgcagtctgccggaagcttacagtaatattctaccggttccaatgtgtccggatcacggtaaagtccgatatgacctacctttgccgccggaatcatcgtaagcataccttctaccattccaagaccagctcttaagattggcacaacagccagtttctttcctgccagttccttaacagttgtcctacagattggtgtctcaatctcgacatcctgtaatttcagatctcttgtcgcctcatagcacatatacattgcaatctcgctgatgatctctctgaaatcttttgatccgacttcttttcttcggataattcctactttatgctggatcagcggatgttccattaccagtacttttcccattgtttttctcctattcttcaattaatgcaatacgtctcttatgtctttcatcttcggaaaacggtgtgtttaaaaatgtatcgacaatcttcacaccaagtcctggtcctaccacacgtcctcctaaagcgacaatattcgtatcattgtgtaatcttgtcgcctctgctgaaaagcagtctgaacagagcgcacagcggattcctttcattttgtttgctgcgatggaaatcccaattcctgttccgcagatcagaatccccttctcacattctccgtctataattgcctgtcctacttttttggcataaattggataatccacagattccccgtcacatccaaaatctttgtactccagacctttttcctctaaatatttgataatctccagtttcaattcatatccaccgtgatcacatccgattgctatcatgcttttgttacctcctcgttcagcttttgtgccagtttctcgataaattctttcatcatctcgtatacactaccatactccgtcaatggctgtccatatgcagatgggattttcctgtcatcatctatatattctcccagtgtatatacatttttgatattctcataatctgccactgcactccatttatgcctgtcatcaatggcaagcaccagtgtctcctcgtcaagatcttcctccgtaaactgccttgacttataatctgcgatcgacatgccctgactcttcatgatcgcttctgccttctgattgaccggctccggaagtggtacgacaagtcctcttgactcaatatcatactcctgcaaaagttcctgatttcttagaagctctgctgccatcggtcctctgctgctgtctgtattgctcaggaaaaggatccgtctgtatttttgtagtcttgtgatctcttctgcccgaagcatatgatgccccgcagcttttttgagacggttcataaccgccgagccaatcccatccatcgcaaaagcttcactgtaaatataatcgacatcttcctcgtcaaactctctgaggacacgatacagattctgagcgatcgtatattcattttcccgtgtcccgatattttttacaatacctcttttatacttttctgccgtctcatctgtagcaatgattccgactttataaccaagtctttcctgctcaaacgcaacctgccggattgccttgaccgcctcttttgtctctccttcaataatcatcaactttgccttcggtgcataatgtcgatacttcatgcccggtgccttcggagcttccttgctcttatcactgacaattgcctgatcttctgtgacctcaccgatcacctcctcaagcatctcctttgtgatcgctcccggccgaaggatcatcggaggtgtcacagtcatatcaaggatcgtcgattccactccgatctccacacttcctccatcgatgatcatatcaatcttgccatccagatcttccttcacatgcatcgcagttgtcggactcgggcgcccggatgtatttgcactcggagcagacacatatcccccgcctgccaaaatgatcgcacgcgcaacctcatccgccggcattctgactgctacagtatccagtcctccggtagttccatatggtaccaatgcacttttttcaaaaatcatcgtaagcggtcctggccagaaatgattcgccagcagtgcagtcttatctggtatattcaccgcaatctcttccaatgcccggtattctgcaatgtgaacgatcaatggattatcagaaggtcttcccttcgccgcatatgttttttttgccgcctcttccttcagcgcatgtgctccgagtccatatacagtctctgtcgggaaagctaccagccctccctccttcaggatgacccctgccattccgatcacattttcgtcaatatttgttctttgtatttcttttattatcgtttccatgccccctattatagcattcttttgttaaaaaataaacctctttacaagtttaaatattccttcaagccttcccagactgcctgtgcgattttctcctgatatgcctcatcttgaagttttgcagcttcctctggatttgtcaaaaatcccgcttctacaatcacagttggtatttctgtctttttcaatatgtaataagtatcattaggttttgcctctctcctgtttgtctcatctaccgtttttaaatgcttctgcaaaatttctgctgccttctttccctctacggaatgtgtaaaataaaatacctgcgcccctttcacatcacttgtctggtaactgttctggtgaatactgacagcgatagacgctttgctatgattaatcaattctgttctttttttcatatcgcgaatctttttattcggagctgtttcctcacaaagtgcagtgtcttcttcacggctcatcacaacatgcacaccattctttgtcaaaatcttctgaagcttcttggcaaccgccagattcaaatccttttcagccaaaccatctaccccgacttttccaggatcaaaacctccgtgccctggatcgatcatcacaatcgcctgttctttttgttctgaaattttcccggaaactgcgttcgtcaatgtcttccccccgatcaaggctgccatgatcagcagaattcccatcatcagctctatctttttctgcaaaaaaatcccccctcttcctatatcattacaatatatgagagggggaaataaaatatcatttctctttctctatgaaattttctgtaatctgacgctattttatatatttttcaatcacggaccagatttcaggcttttcaaatcccagcttccatgcagcaacaccaccaagctgatacttctccatcaattttaattttgcctcaatagaagaactatcttccagccatattttatatgtggcaccgtccgactcccattgcgcataattctgctgtgtctcttcatcccatgtgacggctgctccagcctgtgccacacacgcttcggcttcctgcattccaagagcctcacttgtaacattcatcttatactgcgcctgctctgttccagcctgcgcggcaagttcctgctctgtctttggcacttcttcccacaatcttgtataaaatgggactgcattgattactttctctgctgacacatcctttgtcgcctgccggattccattttccacatagtcaatagaagccactgaaccgctctcccacgagccggcataatgttcatcatatcccataatgatgacataatctgcaaccttcccctgttcctccagttcataatgactattaaatcccatcggcacatagttatctaccgacagaactttttgatttcttcgacattctatagaaagttcgcggataaactcaataaaatgttctccacattcctcagaaactttctcaaaatccacgttgattccatcaatattatactgctgtacctgcatcatcagattatcgatcagagtctttctggccaaagaagaacttaacaactggtatgtctcttccggcgagtcgatgccaccgtcaaaatccctcacaagtgcccatacctccagattcgctgcatgagccgtatccacataagctgaacttgcgatagaattcagatttccctctgtatcggcaactgtaaaccatgtaggtgaaattgttgtcaatccttgtgtcgatgcaatcgtttcgcttaacgtttcatttgctatttcattcgtaacctgatgccaggcaagattgatcttataatcttttgtcatacttgtatattccggtgctttggaagaagaggtgattgtttctgtcttcacagactttaatgcactactctttatatatccgatgatcccatcctctgtgcggactttcttccagtcaccttcctcttctataaaatatacacggtcacccttcttaacttccgtcagaatatcactcttaacacctgcaagccagcgcatctgcgtatccttctttgcagttgtcgtcttcaccttgccccaatcatcaaagagaactactctgttcggactcttataagtctttgcagtgacattcccaaactccagaataaaatccactgcgatataagtctggtccccgatattttttacgattacatagtccttggattccctctgacctgcgttcgtatattccttgctttctgccggtacttccacaagatctaacggcaacgtatagcgcagtgtgccttcggctgcgttccagtaaaatccaccgtcaatctcttgacgtaccgcctcatatggtaaataaaactgtccgtcagacacaatccctttctgttccagaatcgtattgttcacaataactgcagcttgctctgcggcatctacaccataatattcattcaaatcagctttcaccttcgatggaccatattttttccatacaaatatacctgccacagcgacaactacaatgataaaaaataatacgatcaaaagctcaatcaggcatgtccgctttcttcttcgtcttcggtcacgcagcatttccgcccggcttctatatcttcgatcattttctcttctatccatagcctacctcctacctgacctattataccatatgcattttcttttttcgacagattactacatactttcctcgttttcaaaaaataataagaatttcttaatactctgcattgaggggattcgtattattttgctgctattttttgaaaatgaagttcttttaggcttccagtctcatcatccatcacatagtcccgcatatatgcattactttcttttgccatatgtgcattgacaatctgtaacggacttgccggttctccatccatagacattggaatcccgcatttttcatatgcttccagctctatgaaaaattgtctgtatttttcttctgtactattcacttcgttccttcccgtccaaacggtaattatggcttcctccgctttttgctaagacctgggtgcatgtgatatattcttcgcaaaacagatttctgctgaaaaaagaagacagcaaatggacattttaattattatgtgcattttataaaatgattatttgtaattgtaactgctttagttttgaaatttagctgaatcacttagaaaatcgaattaatttagaataaatagaattgttgaaagattttcctgagaatgttttcaccaacacaagatattgcttttgtatccctccttttctcttatacataattaccgggacactgtcttctcatacccgcattataaataatttctcctgactttgcaagtattttctttacatattttttttttttgtttatactattataaagtaagtattcaggtttacgaaaaggaagtgattatgtatgaagatcgaaaaaataaatgacaaccagattcggtgtactctgacacgtgcagatcttgctgccagacatttgaaattaagcgaacttgcctatggtaccgagaaagcaaagatgctgtttcatgacatgatgcaacaagcttccagtgaatttggatttgaagcagatgatattccactcatgattgaagcaattcctgcttctccagattctatcgttctgatcattacaaaggtggataatccggaagagctcgacacgcgcttctccaaatttgcaccactggaagattccgatacaaaacaggctatgcttgagaaattagaaggcgctgacgagtttctcgatttacttgataaagtaaaatctgcagttgcagaaccagctcctgaaaaagaaactgcgggaaaagaagatacaaaaaaagacgtccctgcaaaaccagcgatccgtctgttttctttttcaaatttagacagtgtgatccatgcagccagattgctgcacccaatgtaccacggagcgaatacactctacaaaaatgaaacaaacggtattttcattttagccttagcacaatctgctcacaccaacagtgagtttagtaaaatctgtaatatgttatccgaatacggttcttttgaaaaagcctccggtgctgttcttgcttacttggaagagcactgtcagactgttatttctgcagatgcagtcagacatcttgcagagatttaaggtgatatctcatcccctttcatcatggaatggcatcgttgatcatcggccgcagattggataaaaaataaaaagcgtcctgagccagactttctcaagtatactgtctgcttgctcaagacgctttttctatttgcaaaatctttgattagttgtttgctgctaagaaagcattaatcttttcttctaacagatctgcatccagtccatgtaccatagctgcctctgcaagagtttcagcctgtgaagcaggacatccaagacagtgcattcctacttccataaggattggtgctacttctggatttgttctgatcagttcaccgattgtcatatcttttgtcactttcgctgccatatttatttcctcctttatttctctaatcgcgaaacatatttgaacgtttatccttccttttttcaaatatgtcatactctctcttcgattataatactactccttgaaattatcaactcttacttaattgtttatacattttaatacaattttagaattttcaaaagtcaacaagttttttattttttttcgacaaatgaagatttttattataactgaccaaaacattcgttcttttcttaacaataataatccacacaattcacattcattcatgtggataatgtggataacttggtgtaaaacttttatttttaaccattttagccagtttcctgtgtggaaaacttgtggacagtattttgatagtatttttcataattctcttgtcctcgacaactttgtgcactttgcatatgattatttttccactattttcctatgtctatacaatttaaagttttgcataggaaaatagggcacagtatgctgaatcgcttcacacatactgcacccatttttcctcatttcatcatcattttccttattccagcactcttcgtattgtaataatatctgtgaaaaatgccggactgatcccaatcccgttctcctcatcaattgcattaataatctgattctcttctatataaataccaacatgtccctcatataaaattaaatctcccggaagaatttcatcataagtaacttctattcccgcattttccatatcccacgttgtccgcggaagtttcactccaaattttctatacacggactgaacaaaccccgaacaatctgctccctcggtcagacttgtgcctccccagacatatggattcccaagaaactgctttgcataggcgactaccctttttcctctttcttctactgtccctttcttttcttctgattctacagtatcatatttttcttttatcgtaacataatcatcggatatatatgctcttcccccataatattcgattggaatccacccattttgaggcttctcttctattttctttttggcaccttgttccaactgtccgataatctgtgtgtctgtcccctgacctttccgcacgttgagacaatctgctgtaacttcagcaatctgtatggcagttttctctgttttttttaactctttctcataatactgctcctttaataatccagcccccacacttggtaagtgttctgccgccatagatatacagggaatactttgcgacaaaatctctactgcgatcagacctgccattattttctttctacttctatccctcatagtttcctcctcttttcgctttttagtattcccactttccctgaaatcatgcttttgttaccaacttgttaaatctccctttcaaaattctaaatataaaatttttatgattccttccaaacatattgtgtcagacattttatcgtgttatacttcaagagtaagtgagttttattatttttataattaaaattagataatatatctttgcttacctaaaatttttacttgacaaatcccctttgaataatttatattataatcataataactattactattattgaaagggggattcccattggcaacactaaaatatagtagacaacgagaatccatcaaaaattatctgttacacacagaagaacatcccaccgctgacaccgtctatatgcatgtgcgggaagaattcccgaacatcagtcttgggacagtatatagaaatctgaacttacttgcagagaccggagatgctctgaagattcccaccccttccggtggtgacagatttgatggtaaaacgactccacactatcattttatatgtacttgttgtggaaaagtaatggatctggatatggaaagcattgatcatatcaatgagattgccggtaaaaactttgccgggcagattgagtctcatacgacaatgttttatggaaaatgtgaagattgtattttaaagtcttagcaaaagaatttttcaaatatccattgacaaaagaaactaattatgctaaattaatatcagtaactattactgatattgaaaaataaaaagtaaaagaaaaggagatcttaactatgaaaaaatttgtatgtacagtatgcggatatgtttatgaaggagaagctgcaccagctgaatgtccacagtgccatgtaggagctgataaattcaaagaaatgacaggagaaagagaatgggctgctgagcacgttgtaggtgttgctcagggtgtaagcgaagacattcttgcagatttaagagcaaactttgaaggagaatgttcagaagttggtatgtaccttgctatgtcaagagtagctcacagagaaggatacccagagatcggtttatactgggaaaaagctgcatgggaagaagcagaacacgctgctaaattcgctgaattattaggtgaagttgttacagacagcacaaagaaaaaccttgaaatgagagtagaagctgaaaacggagctactgctggaaaatttgatcttgcaaaacgtgcaaaagctgctaaccttgatgctattcatgatacagttcatgaaatggcaagagacgaagctcgtcacggaaaagcattcgaaggattattaaagagatacttcgcataatcatccctatcttatataatatagaaagaggccagaaagtttctggtctttttcttttgttttcatctggactggtcgttttttgcaaaactggctatttttacatgaccactcttgtgctaggatagatttacaaagaaataaaaacgccatatcgatatcgaatatggcaaatacatgagaggatgagacatatgaaaacaaaaaatcaaactgttatgaaattagcacaaaccgcattactggcggctctctgcttcgtatcatttacttttttacagattaagattccaatgcctggcggtgatgcaacatcccttcacatcggaaatgcattctgtgtgcttggtgcactgttactcggaggctggtatggcgggctggctggcgcgattggtatgaccatcgccgatttaatggatccaatctatatcactggtgcaccaaagacctttttcctgaaattatgtattgggcttatcgttggtcttgtagctcaccatattgcaaagatcaacgacagcactgacaagaaatacgtctttaagtggagtctgatcgcctcgattgccggtcttagcttcaatgtcatcgccgatccgatcgttggatatttttataagcaatatatcctcggacagcctcagaaaatggcagaagttcttgcaaagtggagcgcagcaactacatttgtcaatgctgttgtatctgtcatccttgtagtatttatctacaacgcggtcagaccaatactacttcgcagtggacttcttgtatcccaaccaaaaaactaaataaaatatgctccctcccaaggaataagtatttattattacacttgtcttcctcgaagggagcatatcatttgcagatcttctgcaagttgataccactattttataattcgttcttaatcttttctactaattctgcgtattcttgttctgtgagatacttttctcccggattcattgcgaatacaccgccccactcatatccatctttatatttcggaactaaatggaagtgcagatgatgtccagtatctccatatgctccatagttcactttctccggctgaaataatttgtgaagcacattggcaactttagccacttcatcaaaatataaatgaagttcttcctgagataattctaccagttcacttacatgtttcttatgagcaacgatcacacgtcctaagtggctctgttctttaaataagtaaacttttgagctttccaattcacaaatcttaattccaaatgcatctaataattcgccttctacgcagtatgcacaattctgatctttcattcttttatcctcctgaatctgttctatcttcttttatacactaccacattcaaaaaatatttacaatcttattccttactcctctgtaatttttaaaaatctgtagaacatctttttacaatctggcatggaatcttattattttgttccacatcgttctccccttgaagcacttttaccatattttcaatcgtatcataacaaatctgctctaaatgattgtcgaccgaagttaattctggttcgctgcatacggccatccccgaattgttatagcctgttacgcttaactcttccggcactttgattcctctcgcctttgcgtatttcaatgctcctactcccaaactgtcattgcatgccagtacactgtcaaattctaaggtccggtgcgccagcaaaatatcttgaatataatgtatatcattttttgtataaaattttaaatctcctaaaatcggataccctgcatctgagagagcagcttcatacccctttaacttctgctccgcactatatgtatgagaatcactcaaaaatagaattcttttctttcctctccggatcaatgccgtcgttacatcatatgccccttgaaaatcatctccatagaagcaaaaaatattctctccctgaatatatccatttaccataaagactggaacttgttttgctgccgcctggatatactccgtttctctgggctcctttccaattcctgcataagtagaaccgaccatgatcaacgtatcaattctttttgacaacagaagctttgtatgatgctccttagatttctgctcatgcccgctacatcctaaaatacaatcatacccatatgcatggagtcttttttccagataagaaactgcctgtgccatataaagatctgaaatatccggacacaaaatccctatcatcttcatggaatttaaccctagaccacgggcaaatacgttcggcgtatattctgattttttaataactgcaagcactttttcttttgtcttctcacttacattcggacttccatttaccactcttgaaaccgtggcaatcgaaacccctgaaagcctcgctatatcatagatattcattttatccctctttaattcatccatattttcaccaactttctttcattcattgtaccacatatcactgtcatacttctatatctttcctcactttttgaaagctctttcattctcattctatcatactcgctttttctctttgattcaagtgaaaatccattgtgtttccttccaatttttatcatggttttttgtgtatttcaacgaagtataaagtttttttcattttctgttgactgttttttcaaaatatcgtatggtaatgtaaacgcttacaatattgtttttgaaaggacggagttatgcagaaatttataaaaattcattccagtgataatgttgcagtcgcattggaacctctgactgcccattcagaactaatactgccttcgggtacactcctattgacagaagatatccctcaaggacataaatttgcactttgcaatctccctgagggcgctcctgttataaaatatggtgctcaaatcggaactgctacaaaagaaattccgacaggttcctgggttcacacccataatatccatacaaatctcgatcaacttctaacctatacttatgacagacaagcgactccccttccctcttccgctgaccgcacattccaaggataccgcagagcaaatggaaaagtcggaatccgcaatggtatctggatcattcctactgttggctgtgttaataatgtcgcttctgcgattgaacgacaggcacagtctctaatttctggatcggtggaggagatcctagccttttctcatccttacggctgctcacagatgggcgatgaccaagaacatacccggaagattctggcagatttgatcaatcacccgaatgctggagctgtccttgtcctgggactcggatgtgaaaacagtaatattgatgtcctgaaatcctatatcggcaattatgatgaaaaccgtgtccgctttcttgtcgctcaagactgtgaaaatgagatagaagaagctttaaatatcattcaggaacttgttgattacgccagtcagtttcatcgggagccaatcagctgccgggaacttgtcatcggcatgaaatgcggaggttctgacggactttccggaatcactgccaatcctgttgtcggcgcattttctgacatgctgatttccaaaggaggcacaaccatccttacggaagttccggaaatgtttggcgcagagacactgctgatgaaccgttgtgaaaccgaagaactatttaaccagacagtctgtctgatcaacaattttaaaaattacttcaaggagcacggacagacgatttatgaaaatccatctccaggaaataaaaaaggtggtatctctacattagaagacaaatccctggggtgtacccagaaatccgggcatgcaccagttcgaggagtccttgcatatggagaaccggtttcccgccgcggtctgaatcttttaagtgctcccggcaatgatctggttgcttccactgcgcttgcagcttccggtgcacacattgttctgtttacaacaggacgcggaaccccgtttgcctcccctgttccaactatgaagatttccagcaattccgcactctatcagaagaaatcaaactggattgattttaactgtggtgcaatggtagaagattcttccttagaagaactcgctgcacaattatttgattatgtcatccgcatcgcctccggcgaaaaagtaaaatcagaggcggccggtttccatgatatggctatctttaaacagggcgttacattgtagagcaccctgactttgcaatcaaaaacgaaacaatatgtcaatcagaaagtgaggatatttatatgaaaaaactaagttaccagactctacgtgagcaaaattatgacggctatctacttccggaagcaccagaacgtgtgctccagttcggcgaagggaatttcctccgggcatttgtagactattttattgacatcttaaatgaaaagaccggattccagtcaaaagtcgtcctgtgccagccaatcgcaccgggacttgccgatctgattaacgaacaggaaggactctacacactctatctgcgtggctttcagaatggtcagaaagtaaatcagaaacgggtcatctcctgcgtaagcaggtgcttaaacccatacaaagattatgaagaggtgcttgcctgcgcagagaatccagatctccgttacatcgcttgcaatacaacagaagccggaatcgtctacgatccttcctgccagttcacagattctcctgcttccagctatccagcaaagctcacacagttcttataccgtagattccagaaatttggtacagaaacaggaaaaggatttgtagtccttgcatgtgaactgatcgataataatggaaaagaactggagaaatgtgtactaaattatgcagcacagtggaatctcggtgaggacttctctaactggatccgccgggaaaatctcttctgctccacattggtagaccggattgtaaccggatatccgagagctgaggcagacgagatcaacaaggaaaacggctacatcgatcagttgatcgataccggagaaatctttggattctgggttattgaaggaccacagtctctgaaaaaagagcttccatttgaagaagcaggtctccctgtcctaatcaccgatgatcataaaccttacaagcagcgcaaggtgcgcattctcaacggtgcacacacttccttcgttctgggtgcctaccttgccggacaggacatcgtgcgtgactgtatggaagatgaagtcattcagaagtttatgaataaaacaatttacgaggaaatcattcctacattaactctgccaaaggaagaactggaagaattcgccgcatctgtgacagagcgattccgcaatccatttattgatcatgcgctcctttctatctcgctgaactccacatcaaagtggaaagcccgagttatgccttctctgaaaggatacctcaaagaaactggaaagctgccttcctgcatcactgcttcttttgcattctatattgccttcttccgcggagaaaaactgaccgaagatggactcgtaggaatgcgaaacggcaccgaatatatgatcaaagatgatcaggctgttctcgacttcttctttgcccacagaaatgacagcgcaaaagatcttgcacatacagtctgcaccaacgaacagttctggggcgaagacctcagcaaactggatggatttgaagcagaagtatgccggtacttagaagaaatagaagaaaaaggtgcttacgaagtcatgcgtgaatgccttgcctcttaatcacaaaggacttgaaagggtaagccccttccaagtcctctttcttttatcttacatatttttccaatgtgtttctcactgcaccggttcctgcaagcatttctttcaagtaaccacatacagtttctgccatgtttacttcgtacaagttcacaccaaaaattgctttgttttctaagatcggtcttacagaagcttccacatctgtctcttctccgagtttaaatcctgctacgtatggacaaactgtctcaagaagcggatctgggcttaagtcaaatgtttttccattgtcatccacacccatcagataacggagccatcctgcaaatacaagtggaatcagtttcagatctgctgtatttaagctctcacctgcctcatatgctttgatcgtctcaccgaaacggatcgcaagcttctgagaagtatctgttgcgattctctgtggagtatccggcataaacggatttggaatacgcacatttaaaaccgtatcaataaattctttcgggtcaaggatccccggatttactacaaccggaagtccttccacatatccgattccctctacaagtttctttaatacttcatctttcatttctttagaaatcaagtcatatccgagcagacatccaaacactgccagtgttgtgtgaagcggatttaagcaagtgcagactttcatcttttctaccttgtctacagtctcgcgtgttgtaaacatcagtccgcctttttccagttccggtcttccgttcgggaatctgtcttcaatgacaaggtactcacactcttctgcattgacaaacggcgccacataagaattctttgaagtgatcaccggctcgagttcttccaccccatcattttttaagatttcttccacagaactgtccggacgaggagtaatcttatcaatcatagtccacgggaaagaaactttgtcaggattttcgatgtaagctacaaatccagcctcagcaactccattttttacccatgtctctgcaaatgtgtggactgcatcgtataacttcgttccgttgtgggaacagttgtccatacttaccattgccactggcttttctcctgcctggtatcttgcatataaaagtgcagatacttttccgatataacttcttgccttctcaggtcctgccacaaaatcctctgcgacatctgcaagtgtttccccttttccatttacaaggctgtatcccttctctgtaattgtaaaacttgccatctgaagagaatctgtcgtgaagatttctttgagtcttccaaaatctgtctcattctcagaatccagtgcaagagattctgcaacacttcctactacagttttctctacactgccgtctgcttttaatgtcacaagaatgctgtaatcatcgtgtgggcggttcattttttctacgatttcataatcatatccttccgccacaacaattcctctgtcaagcactccttcatttaagagattctgtgccacatttgcctgaaatgcacggaaaagattccctgctccaaagtgtacccaatatggtgcttcttttgtggcagccaccatttgctcacggtcaaactgcggaagtcggtatcctttttcctcccactgttttctatctgccaatccagctttgcttaactgcatcctattttgcccctttctcaattgcttcccaaagtccgtttaagtaagttgctccaagtgctctgtcatacagtccgtatccaggcattgccacttctccccagatcatacgaccgtgatctggtctgattggtcctgtaaatccgatttcatagagtgctttcataatttcatacatatcaaatgttccgtcagaagaaaggtgtgcagcctcctcaaaatctgtcggagagttgaattttaagttacgcacatgtgcaaaatggattcttcctttcagagagcggatcatatccggaagatcattttttaagtttgttccataagatcctgagcagaatgtcacaccattgtgcgggttgtctaccatactcatcaatcttaagatatttgtcttattgatgataattctaggaagtccaaatacgctccatgcaggatcgtccggatgaattgccatgttaatgtcgtatttgtcacataccggcataattctctccaggaaatatttgagattttcaaataatttttcatcatcaatatctttgtacatctcaaacagttcttttactttctccatacgttccggttcccatcccggcatcactgttccgttcatatccccggcaattgactcaaacatgttttccggattgattgcatctactgcttcctgtgtatatgcaagtactgtagatccatctggtctcattcttgcaagctctgttcttgtccagtcaaataccggcatgaagttataacatacaagatgaatatcttcctgtccgagattttccagtgtctcaatgtaattatcgatgtatttatctctgtctgccgcacctgtcttgattgcatcgtgtacgttgacactttcaatacctgctacatgaagacctgctgcttctacttctgccttcatctcgcggattctctctctgctccacacttctcccggtgttgtgtcatataatgttgtgataactcctgtcacacccggaatctggcggatctgctgtaatgttactgtatcaaattttgaaccataccatcttaatgtcatttccatgattttcttgtttcctttcattacctcttttatttgcgtttcttctcttcatcttacaaaaaaacaacaaaaagcaccattggcgtatttgttgtatacattgcatttcttgttgttttatagtattatagcaaaataaaaccaaaaaatctcaccaaaaagcagaaaggacgccctatgaagaaagaactccgcacacagtttcttacacgccagcatatggtatcaaaagattttgagatttactattacagtgacacaactctcttaaaagtagaaaatcatgctcacaattactatgaattctatttttttctggaaggtgatgtcagtatccagattggttctgatatttatccagttcaatttggtgacattatgctgattcccccgcacatttaccaccactcgatcatccacagttctaaagttccttaccggagatttatcttctggatcagtcaggaatattgtaattatcttgcccagatttcgccggattatgtatatcttatgcaccatgtgcaggcaacacacacttatctgtaccacaatgaccgggtatccttcaatgcagtgcagtccaaagcacttcgcctcattgaggaaatgcagtcggataaattcggaaaagaagcccagattccgctctccgtcaacgatttgatccttcatctgaaccgaatgatctacgaacgtctgcatcctgcaagacaacacgaaggacttgccctgtaccagaacatctcgcagtatattgaagagcatctcaatgaagacctgtcgctggatcgccttgcgagagaattttatgtgagtaagtatcatatcgcccatatctttaaagacagtatcggaatctccgtgcaccagtacatcaccaaaaaacggttagaccagtgccgggaggcaattcttggaaatatgagcattactgaaatctaccagctgttcggatttcgggattactccagtttttaccgggcatttaaaaaagaatacggaatctccccgaaagattaccgggatatgaattcattaattctgaatcattagatttccgcattcttcttaattttttcctattactttttgttcttattttttacttttgatttgccggctcgatcgcaatggattttcctttgatcttcacattctgcattgcgtgaagaacatctcttgcatactctttcggcacttctacaaatgtatatttatcaaacatatcaatcgttccgatcagttttccaggcattccactttctcctgcaagcgctcccagaatgtctcccggtcttgctttctgcttcttcccaatattgatgaacagtcggaccattcccggctcttccgctccggtatctccgaagtcaaattcatcttccgattcattttcatctttcattccggtgtacaatttcaaaaatgcggctgccatatccattgctgtatagtcagaatcattgactttctcctcaattgcattgatcatcatggtcagatcttctttttcaatcatcttctcaatctcttccaatacattgtcaatctttgtatttgcgacatcgttcaatgacggtactttctgtgcgtagatctttgtcttgcagtaacgctggatttctttcaatttatatacttcttttccggagacaaaagaaaaagaacgtccaactcttcctgctcgtccagttcttccgatccggtgtacataatactcttcatcctgtggcagatcatagttaaatactgcctccacttcatcgacatcaattcctcttgcagccacatctgtcgctacaaggatatctgtctttccacttctaaatccctgcattacacggtctctctgtgcctgcttcatatctccgtgaagtcctgctgcaaagtatccgcgccctaaaagtgcagttacaagcagatctacctgcttcttcgtattacagaagatcacagaaagtttcggtgtataaatgtcaagcagacgtgtcagcacttcttccttattcttcggtttcacctcatagtagaactgttcaatattcggcacagtcagttcctttttcgtcactttgatcagttctgcattcttctggaatttcttcgtaatctccatgattgccttcggcatcgttgcggaaaataatacggtctgccgctcctctggaactccttccagaatcgtctcgatatcctcacggaatcccatattcagcatctcatccgcctcatctaagataaccgtatgcacctgctccattttaattgtctttcttctcatgtggtccatcacacgtcccggtgttccgatgatcagctgtgttccactcttcaaggaacgaatctgttttacaatttcctgccctccataaattggaagtactttgattccatgcatatactttgccagattccggatttcctccgccacctgaattgcaagttctcttgtcgggcagagaacgattccctgtaatttcttgttcttcggatcaattttttccagcatcggaattccaaatgcggctgtctttcctgttcctgtctgtgcctgtccgatgatatcttttcctgtcatcataaccgggatggctttactctgaatcggagaagcctcctcaaatcccatatgttttactgctttttgaatctccgggcagattccaagctcttcaaatcttaatgtttccattatttgtttcctttccgttctttctgtatttatctatcctgtcattcatactttattgaaaagtaatttatgactaatatttcctacatgctatttctgtccataaaaatgaggctggtgcaaaatgaactttgcagcaaccccactcataaagtacacgtcttccatcataacagatgctctgaattttgtctatctttttcttttcctcttgcatttttgtaatagaagtagtaatatcaacatatacttaatgtagtatttaaaactacttatcgttttattcatcattgatcaggaggcattcttatgaaacaaagacatttaaaagatcccggaagcgcgattactcattttatcgcaatgctgatggctatcttttccgcaacaccattgttgataaaagcagctcacaaaggagatcccatctatgtgatttccctcgcaatcttcattggaagtatgatcttattatacaccgcaagcaccttatatcactcccttgatatttccgagaaagtgaataagcgtctgaaaaaatttgaccatatgatgatctctgtgctgattgcaggaagctacacacccatctgcctgatcaccttaaaaggacctgtcggctataccatgcttacaatcgtgtggggcattgcaattctcggaatccttgtgaaagcgttttgggtaaactgtccgaaatggttctcctcggttctgtatatcggaatgggatggacctgcgttttggcattcacaaaacttcttgacacaatgtccccaggtggatttggatggcttttagccggcggaatcgtctataccatcggaggaattatttacgcactgaaacttccaatcttcaacaccaagcataggaacttcggaagtcatgagatctttcatctatttgtgatgggcggaagtgtctgccactttatcgtgatgtatgtgttcctattaagataatctctatagctaatctataactaacataaaaatatacgctctttcagatgacaagcttttgtttctactcgtcttcttgaaagagcgcatatcaaaagaaatgtatctctgtttacgacaattctttatttctcatatgtcaaaggcagatcaaatccaaaatagtttactgcattgttgtaagagatatctgctatcatttttccaagtctctgttcatcggctggatattctccattttctacccaatttccaatcatttcacacaagattcgtctaaaatattcatgtctggtataggaaagaaaacttctggaatctgtaagcattccaataaaattcccaagcagaccaagatttgccagagatgtcatttgttctgtcattcctgtcttgtgatcgttaaaccaccatgctgatccctgttgaacttttccaactgcgctctgatcttgaaagcatccaagaatcgttccgatcgcagcattatcatttggatttaaactataaataattgttttcggaagttcatctgtctgattcagtgcatttagaaagtcagccatttccgaagacggcgcataattgttaatgcaatcatatccagtatctggaccaagctcctgatatcgaaggatattgttatctcgcttacatccataatgtaactgcattgcccatccacgcttgtgatattctcttccgacaaaaagcataaatgctgttttatactttagttcttcctccttagaaaccaattctcctctcattcttttcgcaaagatttgttctagttcctcatcggaaacaggtctgtacatcacaaattccaatgcatgatcggatgctctgcagccataggacgcaaaatgctccatccttactttcagcgcttctttcaaatcctcaaatgtcttgatctctctctgactaacttcctccagtttttttagataatccaaataatctggtttttcaatattcattgccttatctggacgccatgccgggaggacctgtacatcaaactcttcatcttctgctatgaccttatgccattccaatgaatcaatcggatcatctgttgtacaaattaattttacattggactgtctgataatgtttcttacactcatcgaatcttcctgcaattttttattacacagattccagacttcctctgccgtttctccgtttagcgctccagtatatccaaaatatctctgcagctctaagtgactccagtggtacagcggattgccaatcgctttctccaaagtctctgcccatttctgaaacttttctctgtctgtggcatctcccgtaatatagtactcatcaataccatttgaccgcatctgacgccatttataatgatctccacccagccatacctgtgtgatattttcaaattttctatcttctgcaatttcttttggagcgatatggcaatgataatccagcacaggtgttgtttctgcatacttatgaaatagattctgtgcagtttctgttgataacaaaaactctttatccataaattgtttcatgaacactttccccttcctctaattttactcaccaaaaacagctctgtaatctgcctgaaatttctcaattccctgatctgtaagtgggtgtttgatcatctgctcaatgaccttatacggtaccgttgcaatatcagcacctgcaagcgcacagtctgtcacatggatagggttacgtacacttgctgcaatgatctctgtatccagatctgcaatagaaaacatctctgaaatctcccggatcagatcaatccctcgtaccgaaatatcatccaatcttcctaagaacggcgaaacataagcagctcctgctcttgctgctaagagtgcctgattggctgtgaagattaatgtcatatttaccttgataccttcctcagccaatactttacatgctttcaaaccttccgcggtcatcggaatttttacgaccatattcggatgaatcgctgcaatgctctttccttctgcaatcattccttctgcatccgtcgttgttgcttttacttctccgctgattggaccatctacaattgctgtgatttcccgaatcacttcttcaaatacgcgtccttccttagcaatcaatgacggatttgttgtcaccccacaaatgacccccatatcacttgcttttttaatgtcttctacttttgctgtgtcaataaaaaatttcatttcctcacacctccgtctacagtccgcctatacaagttcctttactttggcgatctgactttcatttaacgcaagaatatcactgttttccatagatgtgttggaatcttcaatcaggatcattttcgtatctttacaggtaactgtattatgccacagcgttgcaggaatattataaaccttatccggctccatttttacagctccaagctccaatccactctctgtttcatttgcataaatcagtgtacaagaaccttccacaagaacgaataactcatctgttttgttgtgtcgttccagacaatcaatcccagtaatatcatttgccggtttccagttcttgatccctactgtccacttttcattttcaaataccctctgcattccttcgccttcaaatgcataattttctattttcattttcctcttcctccaatctttaaaacggtttgctatgctagtgttgctttacatttttctataatattttctgcagtcagaccatatgctgcaaaaagctgatccggttttccagatttaccaaatttatcctggattcccactctttcaaattttgcccctgcattgcctgcaagcacctctgcaactgcagaacctaagcctccgatcacagaatgttcctcagctgtcacaattcctttgcatttcttattcatttctaaaatgatttctgtatcaatcggtttgatcgtatgcatatttacaactgctgctgagataccttctttttccaattcttctgctgccttcagagcgattggaaccatcagacctgctgtgataatacagacatcgtttccgtctcgcataatattcgcctttcccggaataaatggagtatcttcctctgtaatatcctcacataccggtcttgccacacgaatataaactggtccatcaatctccgcagctgccataaccgccttctccgtctcttttggatcacaaggaacaaaaactgtcatattcggcatctctcgcatcaatgcaatgtcttcaattgactgatgacttcctccatcttctccaacagataatcctgaatgtgagaatgcaaattttacatttgcatttgtataacagatagaatttctaatctgttcgtatgcccttccagaaccgaacagcgcaaatgtacttgcaaacggtatataccccgtatgcgcaaatcctgctgccgcgcacatcatattggcttcggcaattcccatattataaaagcgatccggatatgctgctgcaaatgttgcagacatcgttgcgtgtgcaagatccgcatccaaagctactactttttcattttttgcacccagttttactaatgcttctccgtaagcaactctcagtgattttcccattttttacgcctccaattctttcattgcaatttgaaattcttcttctgtcatcggtcttccatgccatcccacttgattttccataaaggaaacaccttttcctttgacggtatcacagcaaatgaatttcggctttccactaaccggaaccttcagtgcctctgtaatctcttttatattgtgtccatctacttcaaagcactcaaacccaaatgctctgaacttctctgtaatatttccaagtcccatgacttcgtcattatttccgtcaatctgcaacttgttataatcaagcatcactgtaaagttgtccaatttataatgtgccgccgccattgcagcttcccacacaagtccttcctgacattctccatcaccgactacagtataaactttataatctgcttttgcatgttttgccgcaagcgcaagtcccatggcaagcgcgattccctgtccgagtgatcctgtattcatatctaccccaggcgtcttattacaatccggatgtccttgcagatgactgtcaatctgcctcaatcctgccaaatcttccttcggaaaatatcctaaatctgcaagaattgcataaagcgttggacatgcatgtcctttactcagtacaaaacgatctctatcttctttttgaggatttttcggatcaatattcatcacttcataatagagtgacatcagcatctctgtgcaagacagcgatcctcccgggtgtcctgactggcaggcaaataacattttcaaaatctctgcccttaactcttttgctttttgttcatagttcatttctttcttcctcctttatttttcaaccatgttaaccctttactgctcccgctgtcagtccttctactaatcttttctgtgcaaagaagaacataatacataccgggatgattgtaataattccgcctgctgtcagaagatcccactgtactcctagctgcccaatcaaacttttcaatgccactggaatcgttcttgtctgtgtattagtgaacattactgcaaatgtatattcattccatgaggtcataaaaatatatacacctgttgctacaagacacggacctagaatcggcagaataatctttgaaaatgctgttctccgattacatccatcgaccaatgcagcctcctccaaagtcagcggaagatcatttaaaaatccattcagaagccatacggaaaatggaattgtaaatgttgtataagccagaatcaatgaacctggtgtgtacagaagtcccatctttctcataatagagtacaatggaatcaaaagtaacacagtcggaaacatattgttgcttaaaaataatgccatcatcgcacgccttcccgcgaagcgatatcttgaaaaagcatatgccgccagtgttgatgttgtaagtgatacgattgttgtagccgctgcaacaacaaagctgttcttcattgcatctaaaaagtttaccgttgtcgtaaacaaattcttataagaatcccatacaaacgctttcggccagtatgtaactgcaccatataattctgcttctggctttatggatgtaataaacgtccagtaaaaaggaaacaaaataaaaagcagaatcaaaagcaatgggatatataatgtaaacagtcgtctgagaaatgtttctctgctcttcattctatgcatcctcctctctgaatgttgatatcaagtatggaattgccacaaccgaaagcaccagtgccagcagaattgccattgccgaggcatatccaagatttaatgcgtttcctttattgaaaatatatacgctcagtgtctgactagagtacgccggtccaccttctgtcatattgaaaatgacatccaccgaattggcaacccaaatgattctgagcagcgcagtaatgtaaattgtatttttaatagaaggaattgtgatccgaaacagtttttgtaatctcgtagctccatcaatatcagctgcctcatataattcttctggaatcccctgcaatcctgcaagaatcattagtgcaaaaaatgggattccctgccagacaattgtcaaaattatactgggaaatgcagtgtttgtctgagaaagaaatggaatgttctctgtgattaaatgcatcttttttaaaagatcattgatcactccaaaatttccatcatacatccatctccacatcaaaccgattagtactcccggcgttacccatggaatcaaactgactgctcgaaccacgccgcgtcccctgaatttcttgtttaacaaaagtgccaaaataaatccaaatagaaactgaaatcctacacctgccactacccaaattactgttttcccaagtgcccgccaaaacaatttatcttgaaatgcctctacataattctgtagtccgataaactgaatatcttgcggtcttctaagatcataactttggaagctcatcccaatcgcattcacgaccgggatgaaaactacacacaaaataatgagcaatgcaggagccactaacagatatggataaatactctttttctttaccatttcttctccactcctttaatttttttaatatctatcgcttgtgttgtatcatttcctatttataaagttcttcctgcaagatctccatacattctttcgcactaatctctcctgtaagtgcctgccctactgtacttggccatactgtcgaaatccactctgttgtcgtatccttaatcggaatgattcccgcataatccattccctcaatagaagccttcataaatttgttattttggaagtactctccttgctgtacagtctgacttactggtacctgcccagttccttcacaccacatcttctgtccttcccctgttgcaagataagatacccattcaaatgccgctgctttattttcacagctctcaaaaattacagtttccgtatcacccatagaagtccactggccctcgcctgccgggaatggaaatgctgctacatcatctccaagcacctcttccatatttgcagaagagccagtatgatggataaacattgcagtaagacctgactggaagtttgcaactgtctcttggaaaccatcactgactgctgtcggcggaacatacccattttcatacagatcaataaagtcctgcataccttttaccgattctttgcttgtcagattttcaaaatctccgccttctccgtaaatgaagcttccccatggttcctgaccaccttttgctcctctcattccgaatccataaacatctgtctctccgtccccatctgtatccatcgtacattttttaattgcttccaaaaattcatcgtaagttttcggtacttccactcctgctttttcaaaaatagatggtctatagtaaacatataacacttgaacattccaaggcattacatacatttcttcttccgatccacctgcctctttcatgatattataaatattctctggaatatcatccttatcttcccatttatcaatatatggagtcagatcagtaagcaaatcgttgttcacaaacagtggtgtagatgtcagcttccatgtcgctacatcaggtgatcctcctcccatacatgcattaaataggttctctgagtaggctcctccatcccatggtacttcttctccgactacttcaatccctttttcattttccttattaaatttttcaataatctcctgcatcaactgagaatattccgtattatctgcccagtatttaaaattaattgtacatggctcaatctcgccactatcagcctctttcttactgtctttcttctcttcatttccagaagaacatgctgttgctccaaacaccattgttgctgcaagtaaaactgctatccatttctttttcattgctttcttcctttctcctctttatttttcgttctcatttgtaagcgtttacattttctgataaaaaataaatattctaatgataatagaataaatttctttgtaagcacttacattgtatacttgtattatatactccatgcattttcccgtcaattcacgaattttataaaacgaaagctctttttttgtgcgcttttaccaatttttaatccttatctccgttttcctaaaacatattgtatatctcatcctcactattttttcacaaaaaagaagaccggaaactttcttccaagctttcagtcttcttttcatcttttattctcctttgttcagcatattctctacgacttcttttcccatctggtaaaccatcttagatccatctagctgcacatagtaatatgatccgctctcatccaacttaccaatattcaatgtaagtgtctgctctttcttatcatcgtcttcatacactgcctcgattttgatcttttcattttcctctaatccatacgatgccaatttttcatctttcaccgcatattccacacaagttccaaatgatgctgctccgaatcctccggcaatcgctgccaaatcttctttctggctctcctctttggaatcatatacggtctgattgccattttctgtgatcgtcacttgcttcaagtttgcacttccaatacttggcagtgtttctttctgaaggaagtcattccattcataagaaattgtgtccaaactcgtcccggagacggtgtacactttttctttatcattcagggtcatataataattttcctccactgcatttccaaagtaaagtgtagtctctgtcccttcactatctttcaaatggattgtgtatttcgggttttccagaccgtaatcggaaagctgatctgtctcttttagttccctcactgctgtaagatttccaaaggctgttgccatcgcatcaatatagctttgtgcaactggaaactccttgtcttttgtgtaataccacacatcttcattctttgcaaatgcaaaatcatttccctcatactgataagaaatctcctggagatccgaaatatctgtcacggtaacggtattcgcctcagcggtctctgcttccttctgttcctgttttcgattgtaacttccaagtcccagataaacaatgacaagcactgccagggcgccagtcaaaatcaatagtgatctatgtttcttcatatacgccctcctgctatgcctttcttcgtttcatccatcttgcaaatccagagatcagaatgatcgccggcactccaaagatcatcagcaggctgaatcctccggcatactgtacggtattataggtcactgcaagactctttggctcaaccgctgtattttctacatcatcaaaattacttgtcactgcattcataaacaatttgaagttttctaccgttgtaaaagcatctgtcagctggctatcgatcatcatcggcgctgagatcgccgtcagtcttccctcatcctctgtcgccactgcaccaagaatatattctccctgctcctgtttatcctctgttaccgcaaatccattctcagaagttgtcataaatggagtaacactgatcgtatctcttgccggatctgtctcaaccattccacgtgcattcaaaagtagcaccatattgcttgacattccttccccaagttctccagaagcattgatttccgggaagaatgaatatggattcccctggtacgcacggtccgtatctgcaatatacccatctgccatctgaagtccgtattcttccataaatgtatcaagatttggtgtctcctgatcttctgcaccagagatcaacatcatttttccaccgtttttcaaatactcagaaagtgtatttttttcatcttctgtaatatccgtggtcggtgcatacataaacaaaagatcacagtcttccggaatctcactattcatcagcagatttagctcttccatcgataaatttgccttctcaaacagctctgacaggctggtagatactgtactttctccatgtccactcgtccggtaaattttctttgtctcttcacttgtcacataattaactgcgcttgtgagctgtccctccgcatcaaattgtgactcctgcatctgaccagtcatatagtaagaagactgatcatagacgatgatgtctgtaaatgaaatcgttgttgtcttttctgtatccggacaggataccacgattgtatttgaagatgtatcatactcagtcagtgccgcaggatgaagtaccggatcgatccactcaacagaaattttccccgacaatgcgacatatttacttaaaaatgttttgattctttcatctgtcgaagatttctccgccaatacttttatttctacttttttatccagttttttcagcatctttttcgatgtatctgtgatttcatagatttgattatcgctgatgtcaatatttctcacagactccgggagtcttcctgcgacgagattaatcacgattaccacagcaactgcaaccgctgtcagccccagactgtacgcacctcgtttcgtatgaatcattccaaatagttttttcaatttttccacaatactgccctcctaactccaacgccttttctgaattgtctgcacggtcagaaagacacataggaaaatcaaagaaaaatagagtatcattccgctgatgtcaacaatatgagtaaatgcaatgtttgtaaatggctctgtcagaataaattttccaaacagatctggaagcaggttatcaaacagtctggattttgcaaaatatgttccaattgctgcggcagcgcctaacacttccacgcctgctgcaatcacccagtttttcgtcatctgataaataccgatgaccagaactgtcagcatcacgagaatcccgatcagacctcccatcgccgacgtcggcaggaagtcaacaagtccttcccacaaatacagaatgagaagtaccccaaatgtgctgattgcagcaatgatctggctctctgtcagcgcagataaaaacattccaattgcaatataaacacatccaagaaggaaaaatgccagaattgccatgtaatcaatgccgatatgtgcttctccctggctttcgatgatcagtggaaataccgcatagattgcacatggaaccgcaaaaactgtaaccattgcaaaatattttccaagcacaatctgactaagacttaccggagctgtcaaaagaagttgatctgttctgcttttcttctcctccgcaaagcatttcatcgtaagtaccgggactgccaccagcataataaaaagtatagagtttagcgcataagaaaaatatggatatcccatattcagattatacaccatgaaataaattccggtgatcgctacaagaaacgctataaatacatacccgatcatagaatcgaaataggattttaattctctcttataaatcgctttcatcttcttctcctccttcctcattcgtagaaacgctcggctcttccggaatctctatatcagattccgtgtcgggctcgctgtcaaacttcccagtatgaaagcccaatttcttctgctcagagtctcctgtttcctcctgcgtcagttttaagaagacatcttccaatgtgattcttgacagattcaacttcagtagtgcacaatgttcctctgcaaatgtgtggaagattttctccctaatatccgtctgatctacggtcttgataaaaatatccgtggttccatcctgttgttccttatagtctaccgtttcaatctcctctattttgctaagaatctctcttactcttgtctcttctgctttggctgtcagttcaatcgtttcagaaccatttaaaagccgctccagattctcaggagtgtcacttgctaccagctttccatgcgcaatgatcatgacataatcacagaccgcctgcacttccgccagaatgtgggaactcaaaatgattgtatgatttttggaaagttccttgatcagctcccgtatctcgatgatctgtttcggatccagtccgaccgtaggttcgtctaagatgatcacttccgggaagccaagaactgcctgtgcaagcccgactctctgcttgtatccttttgacagatttttaatcagacgtccttctacctcctccagcttaacaagcttcaagacgtgatccacttctgattttctatcttttttctttacctttttcaattctgctgcaaaatcaagatattcttttacagtcatatccagatacagcggcggaatctcagggagatacccgatgcttttctttgctgcttccggctcctcaagaatgttatgcccgttgatgagcacttctccttccgtggcgcctagatatcccgtcataatattcatggttgtagattttcctgcaccatttggtccgagaaatccatagatctgaccactctccactgtaaagttgagatggtctaccgccagatgactgccatagcgttttaccagatttttaacttctatcaactttttaccctcccgacaaaatgtgtttctctggatcatgctttcgactttcctgaatgatttccgcatccattacggaatactttttacactgctgccaaaaacacgctctgatttttttattctataaaagaaactcgttgattctgtgacagttatgtgttcattctgtgaaaagctccgacatctttcagcatcttttgtctttttccattggaaaataagaaagaaccaaccctctcatcggatcagttcttctttttccttccggctcagccgctttatcgcatattcccttttcatcgcttcttcttttgtttcaaatgtctcataatagatgagtgtgaccggtcgtctcgcctttgtatacttcgcacccctgccctgattatgtgcctccatgcggcgggtaagatcgtttgtccagccggtataaaaggttccgtcactgcattttacaatgtatgtataattcatagcttttttctccccttcgtaatttcatttcctttatcaatattatcacataaaagatcccaaagcagttttgcaaaactttctcttcaggatcttttctttttctattttctattcgtatgcgatatggtccattgggttgactggctgtccatcttttaacagctggaaatataagtttggaccttctacactgtaatactttgttggttcgctcacatagccgatcacactgttttctgtcacatactctcctggctgtaccggtacttctttgagttgtccgtaaatggctgcataaccattccccatatcaatacttacggttgttccgatctgtgcatttgtatcgaccgctgagactgttcctgcggctgccgcttttacttctgcaccgacttgaccactgatcactacggctggattatacttatactgatcaagtgtggcaaaataaatgctctgatccatgctgtaattcataatcacatttccgtctaccggccacagaagggtgtcttcctcactgaaataagctgctgttcctgcagctgccgtctgctctgcccctgcatccgtctgtgccggagtttccttcgcatgttccgtggcttctccttcttcctgttgttcttctccgtcgggattttgcgctgcttcttcctgctctggaagtacgattctatctgtgttggcggcttccgactgctctttttcttctacctctcgctctttttctttctgttcttcttcggccttggcaagctgctctttcatctcacgtttgtagctgctgaatgtataagcccctaccagtgcgacaactgcgataaaacatattgcgattgctgctgccatgccttttcccttcatttggaatggctcttcatttttcttcatcttcatcacctctgactttatttttgccagaaagcgatgtgcttattctaattttaaaaatatttccccgccatcttttaactgcgcaccttcataaaaatattgaaggatttcttcgtatccttttccttcttttgccatctgatttgccgtatactgactcatgccgactccgtgcccgattccaccggaagtaatttgcagttttcctttctgctcctgaaaagaaaaatgactggaaggtaattccaatgcttcccgaaattcttctccggtgcaggttgcctgaccaatccgcacagttgtcacatatcccgccgcatccgttccctgtatttcaaaatcatcaaatgttgcttttttgtcttcttttgtctcttcgggattttctactgcggttaaaaacttgcggcatttttcttttactttatgatatggcagcacacactcctgcagctgttctttcgcctccagatcctttggacaatctcttgccggaagatatggatacgactcgcttccaaatgcttcctgcccgcttctcgtctttcctgcactcagtttgtgatatggcagcattacatattgatcctgatactgcaaaatcatttgatccgtttcctgtactgcccttttcaaattctccttgcaggtttctatcttttccccccactcctgctccaactcttccatactataaaaatcatcggtgaaaatagtctttctgtcatggtctaatttctcataaaaaccggatcgaagaatcaccgcctgcgccttcagcgcttccagttccgaatcggatgccatctcttttgcaagaactcctgcgagatatttctcccacacgatctcctcgactctcgtccctacctgcacctttacatagtcttcctttacgcgactgcttgttttgatgtgggcgccattcataaaaagtgtcaccacatatggcaacaaaaatataatgaccaacagtgaaaataattctctggcttttcttcgcatctcttcgtccctcctctacaatgtatggagagattatggaaactataccgtcatctttcatgaaatatggaaaaaaggaagctgccgcttcacgatttattaatcgccaaagcggcagcaccaaaaaattactctattctgattttcaatccatttttacagccttggatccggcttcactgtcacttttttcaatttccatatatctgcaacgtactcttcaatcgttctgtcagacgtaaactttccgcaggacgctgtgtttaacaatgccatctttgcccacctgtcctgatcgcggtatgccgcttccacacgcttctgggcttctgcataagaacggaagtctttgaggataaaataggtatctgctctgtcactgctctttgtatttaacaatgagttgtacagatcacggtacagttcatgatctccatttgcataagttccgtccacaagctggtcaacaactctttttaactcccagtcactgttgtaaatatccattggctgataaccgccattgttctcgtaattaatgacttcgtctgaactgagaccaaagataaatgcattttccattccaacttcatccacgatctctacattggcaccgtccatggttccaagtgttggggcaccatttaacataaatttcatatttccggttcccgatgcttcttttgaggcggtagaaatctgctcgctgacatccgcagctgcaaagatcagttccgcatttgagacacggtaatcttcgataaagacaactttaatctttccattgatacttctgtcattgttgatcacatccgccacagagttgatcagtttgatcgtctgctttgcacgcttatatccggctgccgcctttgccccaaaaataaaagttcttggatagaaggtgatctccggatgctctttcatctgattgtacagatacattacatgaagaatatttaacagctgacgtttatactcatgaagtctcttaacctgtacatcaaagattgattccgggtccacttcaatcccgttatgctctttgatatattttgcaagacggattttattttgatatttgatctccataaattcttttcttgctttcggatcatctgccagcggttttaattttgccatctcggagagatctgtgatccacttatctccgatatgttttgtcacccagtctgcaagcagtgggtttccatgaagtaagaatcgtctctgtgtgattccgtttgttttattattaaatttctcaggcatcatctcgtagaaatctttcagctcttcgtgttttaagatctctgtatgaagctttgcaacaccattgacagaaaatcctgcaacaattgcaaggtgtgccatttttacctgtccatcatagagaattgccatttttctgactttctcttcatttcccggatacatctggcgcactttttctacgaaacggcggttgatctcttctacaatctgatatactcgcggaagcaatctggagaacagatcgatcggccatttctcaagcgcctcagacatgatcgtatggtttgtgtatgcacaacattttgttgtaacattccatgcatcatcccagcttaatccttcctcatccatcagaagacgcatcaactctgcaaccgctacagtcgggtgagtgtcgttcatctggaagatcactttctcatgcagacggcgaatatcatcattggagcgtttgtatttatcaatggcttcctgaagacttgcagagatgaagaaatactgctgtttcaaacgtaattcttttcccgcataatgattatcgtttggataaagcacctctacaattgtttttgcaagattttcctgctccacagctttgtggtattccccacgatcaaaagagtctaaacggaaagaggtgattgctttcgcatcccagatccgcagtgtatttaccacattatttccataaccgacgattggcatgtcgtatggaattgcaagcacggactcaaaattctcctggataaattcatctcttccagtctcgtaattgtgctgcatacggatcgtaccgccgaagcggacttcctttgcatattcgtccctgcgaatttcaaatgggttcccgttttgcaaccaattatccggtgtctctacctgatacccatttttaattttttgtttgaacattccgtaatgataacggatcccgcatccatatgcaggatagccaagagaagtaagagagtccagaaagcaggctgcaagacgtcccaatccaccatttccaagggccgcatccggctcctgatcttccactgcattcaaatcgattcccatttcttccagagcctctttcacatcctgataagcagttaaattgatcaggttatttccgagtgcccttcccatcaaaaattccatcgacagataatacactgtctttggtgattctttttcgtatacttcctgagtcgcaagccagttgtcaataatatattcttttacagcataagacaccgcctgaaatgtctgctgcggtgttgcctcatctatcgttcttctatacaaagtcttcacattgttcttgacttcttttttaaacgcttctttatcaaacttaaaatccgacactttctctctcctctctcttttatccccgcacctctttctgatgtgcggggatcatgctcgtgtaccgtctctttaatctgtgtaactctctcttaaattaacgctgtacacccatatttactttttcaccattgatgttccactctttgacatatcctgccggagtctcctgcttcatctctgtcgcaagcacttcgcccatgatctctgtctgatattttgcgaacacttcattggccttctctgttccttcgtaatatactgtgatcttgtctgtcacttcgaagtctgcttcttttctcattgtctggatcttactgatgatctctctgacaaatccttcttccaaaagctcttctgtcaggtttgtatccaacacaactgtcacaccgttgtcactctcagaaacatatccttccatctgtgccatatcgatcagcaagtcctctttaaataatgtcacttcctgtccattcacatccagtttcagggatcctgtctcattcagctcatccattgccttgtttccatccagattttcaagggcagctttgattccacctaacattttaccatattttggtccaacagtcttcaactgcggtttaaatgtatatgaagtaaatgcgcgaacatcatctgtaaattccatttcttttacatttaactcttcttccacaatctcctggtaaaattctggtaaagttacagaagacttcacgaacatttttccgattggctgacggttcttaatgtttgcagtatttctgcatgcgcgtcccatcacaactaatttcagaacttcatccatgttctcttctaactcacggtcgatcaacgcttcatctgcaaccgggaagtcacataagtggatactttccggagcttctttgtcgatgcttctgacaagattctgatagatatcttctgtcataaacggaatcattggagcagctacttttgccacagtcacaagtgctgtgtaaagtgtcatatacgcgttgatcttatcctgcggcattccttttgcccagaaacgctcacggcttcttctgacataccagttactcatatcatccacaaattcctgaagtgctcttgcactttccggaatccggtaattttccagatttgtatctacagtcttgatcaatgtattcaacttggacaacagccatttatccataaccggaagtttctcgtattccagctgatattttgtcgcgtcaaactgatcgatctccgcatataatacgaagaatgcgtaagtgttccaaagtgttcccatgaatttacgctgtccttctgtcacgatcttaccatggaaacggtttggaagccacggtgcactgttgatatagaaataccagcggatcgcatctgctccgtactgctctaatgcttcaaacggatcgactgcatttcctttggatttactcatcttctgtcctttttcatcctgcacatgtccaagcacgataacattcttatatggcgctttgttaaatacaagtgtcgagattgcaagcagagaatagaaccatcctcttgtttggtctaccgcctcggaaataaagtctgccgggaactgctgctcaaataaatctttattctcaaatggataatggtgctgtgcaaacggcattgccccactgtcaaaccagcagtcgataacttccggcacacggtgcatctcttttccacagtgcggacacttgatcgtcactgcatcgataaatgggcggtgcagttcgatatcatccggacagttgtctgacattgatttcagttcttcaatgcttccgatggaatgcatatgtccacattcacattcccaaacattaagaggagttccccagtatctgttacggctgattccccagtcctgtacattctcaagccagtctccgaaacgtccttttccgatgctttccggaatccagttgatcgtattgttgtttctgatcagatcttcttttacttctgtcatcttgatgaaccatgactcacgcgcataataaatcaatggagtatcacatctccagcagtgtggatagctgtgttcaaaattcggagcagcaaagagaagtcctctcttctccagatcttctaataccatcggatctgctttcttacagaatgttcctgcccatggagtttcctctgtcatctcacccttttcatctactaactgaaggaatggaaggtcatatctgcgtccaacctgcgcatcatcctcaccaaatgcaggtgcaatatgaacgacaccagtaccatctgtaagtgtaacgtaatcagcacatgtcacatagtatgcccgcttatttaactctacaaacgggaataacggctcatactctttattttccaaatcttttccgacataagtctctacgacttccacatcaccttccagcacggtatccacaagtgcctgtgccatatagtatgtgtaaccgtcattttttacttttacataagtttcattcgggttgacacaaagtgcaacgttagaaggaagtgtccatggcgttgttgtccatgcaaggaagtaagcatcttctccctttactttaaatcttacgattgcggaacgctctttgacatccttgtatccctgtgcgacttcgtggctggaaagcggagttccacaacgagggcagtaaggtacgatcttatatcctttgtataacagtcctttctcccagatctgttttaatgcccaccactcagactcaataaagttattgtcgtaagtaacatatgggttatccatgtctgcccagaatccaactgtcgcagagaaatcttcccacattcctttatatttccatacactgtctttacaatgtttgataaatggctctaatccatattcctcaatctgctcttttccatccagtccaagcaatttttccacttccagttccaccggaagtccgtgtgtatcccacccggcttttcttggtaccatatatcctttcatggtacggtatcttggaatcatatccttgatgacacgagtcagcacatgtccgatgtgcggttttccattggcagtcggaggtccatcgtaaaatgtatatgtctccccttcttttcggttttccatacttttccggaagatatcattctcttcccagaatttttctgttttcttctcacgatcaacaaattttaagtccgtagatactttctgatacatactgattctcctttactttctatatttcataaatgcggtcctgccggcccggttgcaaagtaatcttaaaaatggaacataagattttcctatgtaataaaaaaactcccgccctgtaaaaggacggaagcataatctttcgttttaccacctgttacaacataccagcatatgcgctcccgataacggcggaatcccgtcagtgcttacttatttttccaaaaaatgttcagcccctgcaactcagaagtgatattcaaatatactttactcctaccaggcttccaccatccccggctcgctttgattttccggtatattctactgtcttcgtcaacgtctttacctatacaaattccattatagaaacatttcacgccgccgtcaagagttgtttgtgatgtttttcccaacttttctttaccattttttcatactctatttatggattgtgtgacgttttcatggtagaatcagaataacttaaaaacttgcggaagttaactccccacaatcacattctttgctgcagcaatcagaatcccaaaagaatatttgaaaggtggctcacaatgcaagcagaaaatatactcgctaaaaatatttcggcagcaggcaggaagtcctcttacgatgctgcctgtaagcgccttcttgccaataaaattattctggcatggatcatgaatcctccggaaaaccggagaaatacaatcacccgctactccatccatgaggaaaatatagtcggcaatgtacacgagattccccaaaactatgatcttctctctgcaattataatctgcttgagtgattctgagcaggaggctgacagcggcgtgttaaaattattagaagtactgctctcccctacccgggaggcagcagaaaaaaagcaaattttgcaagatgattttcatattaaaatgaccaggaaattagaaaaggaggtttccactatgtgtaatttgagcaaaggaattgaagaaattggactgagagaaggtaagaaagaaggaattctgttttctattcaatctctcatggaaactatgaattttacaatggaagaagcaatgaatgccctgaaaattccaaaaacagagcaggaacaatatacaaagaaattgaaacagaaatagatctctataaaaaattccttatagaactataacaaaaaagtgatgccaaatgaaataccggttatcattcgattgattctaattttctcttaaatccggtttcattttccatcacctttttgtgaaactgtcaaaaatatcttttaaattttttctatcaaaaatatccgttaaaatttacaattcttccctcgtcacatttttcagccatttgtaactcttataacgataccacgtgatcggaatcttaataatctcatcactcatcaggatcatatagaccaccggcacattacagtgaaatacaaatgcagcaagtgctccaaacaagatcgaacagccccacatggtggacatatccagtatcaatccaaactgtgtgtcaccaccggaacggaacgtcccaacaaccaatgtcgtattatatgcctgtcctactacaaaataagacataacaaaaaacataaaccgcatgtaccatctggcagtctctgacaatgtcatcgcctccgccataaacggagcaatcgcaaggattaagattccaccgagcactcccatcagtacactgagccatacgaacctgcgcgcataggcttttgcatgttcgtattttttctccccgattgtctttccaagataaattgccgtcgcacttgccagaccgaatgcaaccactgttgcaagctgtcttgccacttgcgccacagagtttgccgcaaccgctgcacttcccatatgcccaagcaccgctgtgtttgccgcagttccaagcccccatagtacttcattcaaaataaccggaaatgcatatttcaagaaatccctgttaagcactttctctgtatgaagaaagtatttcgtatgaaacttaatatccttattccaaaagtgagagtatagacagactaaggccatctccaacaatctcgcagtcagtgtaccgattgcggcacctttgactcccaatgccggcattccaaacaatccaaagatcaacaccgcattgatgcccacattacagatcagagagcataagtatacaactgtcgccacaacaacccgctctacacttctcataatataaagataggtctgcgtaatccccataaaaatataagaccagctgacaatccgaagatagaccactccttgttctatcacctctggatctgaagtaaagatcttcatcaatgtatggggaatacactgggctgccacaaaaaatacagctgtcacaattacggctgaacgcattccaagtcctaatatcttctcaattgtgcagatatccttcttcccccaatactgagcagtcaaaacggtcgccccggaagtcagcccaaataaaaacagtgtcataatatactgtacctgccctgccagagaagcaccagaaagcgcatgctccccaaccttcccaagcatcacaacatcggctgccgtcacacctacattgatcagattctgaagcgccatcggaatgacaagcgctaacacactgagataaaaatgcttccagtttatattcaaatgttgctctgattcttttacttttccaaacatccttttcctccttcgttcctcttttcttttttcctcaaaatcctaactgattatagtacgaagctttctcctgtgcaagtcaaaatttttttcatctcctatttcccccttttcatctctatggtatgatacatgggaaacaaacaacatcttactttatgaggggtaacattatgaacaatcagaaaaaagccgcagctgcggcaacaaacgcaattacggaaggaattatctggagacagcttttgattttcttttttcctattgttctcggtacattcttccagcagctttacaatactgcagacgcgatgatcgtcggacggttcgttggaaaggaggcactcgccgctgtaggaggttcttctaatcagatcatcaacctgatcatcggattctttgtcggtgtttcatcaggagcaactgtgatcatcgcccagcactatggttcgagaaaagaaaccgaactatcccatgcactgcacactgcgattgctttctcgaccgtatccagtatttttctcatgggcgccggctattttctggcacctgcgcttcttagcatgatgaatactccggaaagcatgatggcagattctgtaacttatctccggattttcttcctcggaattttgtttacattcatctacaatatcggctccagtatcctccgctctgtcggagattccaagcgaccactgtactacctgatcgtttgctgctttttgaacatcggactggatcttctatttgtactcgtgttccatatgggaattgccggtgctgccattgcaacggtactgtctcaggcagtcagtgccatccttgtactgctcgccctgatacggacatccgatatttacaaactacatctgagaaaagtccgattctttgaaggctctctgtcctcgatccttcgtatcggaattcctgcaggacttcaagcagccatgtacagcttgtcaaatattattatccagactgctctaaatgcacttggaactgataccgtagcagcatggacttctttcggaaaaatggatgccttctgctggatggtcatttccgcctttggtatttctgccacaacttttgtcggacaaaattatggcgccgggaaatatgaccgcgtaagaaaaagtgtgcgtgtctgccttggaatgacacttgcttcatccatcgcaatgagtatatttctaatgaccgccggaaagtatctgttccatctgttcacaagtgatccggaggtcatccgcatcggaatccagatcctaaactacatggcaccggcttatgctctgtttgtctttatcgaaatctactccggagcattgcgtggaatcggtgatgtcatcatcccgacaatcatgacatgctgcggtgtttgcgtattccgtacactttgggtattcctgcttgtcccaaaatcacctacgatcgaaacaatcacattgagttatccaatctcctggggaattacagccgtactgtttatcatttactattataaaaagcagaaaaaacttggtatggaaaacttcgatcagtaaatctttatacgaaaaatatcaaagggaaattgtggcttattctgcacaatttccctttacattttgtcccacagctctttcctatctccgcggaagtctatgatcctcacttcttttattcgtatgatctttctgcttttgatactgctgtcttcttcttgcctgaacctgctgctgtcttacctgcttttcttttatctggcggcggcgtttctgctccatcagccttcgctgccttctccgctgtcgttttctatagacaagcgcacaaaaaatcaagcccattgcaataataactgacacaactatgccaataatcatcttaactttcggtgaaacagtaaaaagaggcttttgttccttctgatctgtctcgtttttttctgtcttcgttcctgctgtgtttgtctgaaaatatgaatctttcaaaacaacttctgagactccgaccgtctggccatcgtaagtgtaagtcaacgtacctttctttgatttcccgcttttatcttccgggacaatctccgcttttacatcttgaaattccacattcttcggtacaacaatgtaagcatcttcctctgtctctttcacaccttttggaagatcctttccctctaaaggaatctttttaaaattattgaaaacatattctgccatatttttcgtgtccggatatacatgaaccccatgtgttttcaaattcacagagacaagctgaagttctccattgtctaaataagaaacaagagtagacagtgcctggtctgtatatcctgtctttcccccaacacatggctcataaaaggtatctgttccatcataaagcatctggtggtactgctgaaatactcgttcctcattaacaaggtttgtaggtggaatccgatgttcgtatgtgttcgtgatcttccggaattcctcatgctgaaatgctgccgatgcaatgagcgccatatctctggcagaaacataatgctcttcgtcgtgaagtccatgtgggtttgtaaaatgtgtattcgtacatcccagctcctctgccttctcgttcatcatacggataaaattatcatacccatttcccactgtgtctgcaatcgcataggaaacttcattcgcagatgccaacagcatcccatacaaagcatcctccattgtgatctcttctcccggctgcataccaatacttgcatctccatattcaagaaatgccaccgactcttcggtaaaatgaaccttatctgtcagctcactgttttccaatgctacgagcgccgtcatgattttcgtaatactcgccggaaattccttctcatcaatattctttgcatagaggattgctccactgttcatatccatgatgattcccgcctccgcaaagattcccggtccctctggccagttcttcaacgcatttgattccacaggcatctcatacactgccttctcttcatccgtaactgctgccgctgctccttctacctctgctgcacatacctcatacactgccgtatttgaaaaaacaagtcccgctgccagcaggaacgcggctaatctatatctcaatttcatctgtatttcctccaaaacatcataagcggtattataacatattcttgttcttcttccaacaaaaaatacatttgagtttcacagaaattcacagaaatgcaagtcttccacaaaataaacttttatttcctcaatgaaattaaaatagaattaaaatccttaattcccattgaaattgataatacagagacacattttctcctgtctgcaatgctatactaaactcaaataacaaacattccctgtatttccctacaaggaggttctgatgaatcaggaaaaggtaaatctatggttgacaacacatggtatggtgcaggaagaaccatttattactgcactgaaaaggcttgtcaacgactatctactaagagcaaaatatcaaacccaggaacaagtgtataaagaacttggtatttgcaaacaaactctgtcctactgggcaaaaaatccagatcatactcagacaaaaaaacaactccgttacgatacaattgtaaaatgttctcgactgtttgaattgacgccaaaagaaaccgaacttcttgcaaacaaagcgggactttccatcactcattttgattctgcaaaaggatttccttcctttgacacacaatggattctgtcatccgcctgttcccgaaaggaactggctctccacaccaatatcacagaaaggatgctgggatatattctcagtggaaggcacccgtcaaaatctgctcttttatccctcgccatatcccaaggatacagcatcgaccacatccagcttcaaatgaaaaaagccgggtatgtgctatctatgtctattccttcagatattgttatcttatactatctgtcccatccgcctcgcgcaaatccacttcccttagtctggcaaatcaacctaatactagatgagctgggacttcctatgctggggacaaattctcactagagtcacaatttatttccggattttttatgtattttgttgtatcttttacttataaggaatatttcgacaaccaaatgatctaatgaaaggagaatctacaatggcaagtatttcaaaagtattagataatcttacgggacaaactgaacaacgagctgctgcaagaaaggaactttcgacgcttgtgaaaatggcaaatctaaagttggatacactggaagcgaaactggtacagatgtttcagaacagagagattgaatccaaagtctccattatcggcgacagactgcaagcgttttccagagaatatcgcgtaaactattccgacggagatgtcagcaatgctgtaactgaactggtagataccatcatggatattggtagtgaaagcgcacagaaaattatttgcaagattttaaaaaatggaatcaattccatgtttgcatcggcaagcttggatgaagaagaaaaacgtttattcttagtcgtaatggaaggtgctgcactgatcagatatgacttctacatttggaaaagcgcagaacaggacgaagctctatttaaacatgcggaaagcgttgttgccattacctatgcacgttctattgtcgatcatacaaaagtcagtgaagatgagttaaatgatgctatcggacgctccttaggcaacgtcactatacaagaaattattgattataaaaagcaactactagaattgtataagctgaaagcctccggggttgatttccagtcagacgttaatcttatgaatagcggagacgatgaatccaatccatatcaccagagaagaaaagcaatacgattgaaaatgcaagcagagaaagagcttatttctgagctggaaactcttaaagtagaagacagtaaacaatataaatcattcatcatgaatgctgtggattgatatcccctattctctggaaaatcgtaacaccaaataaggtcccttgacatttaggcggctactttgcagccaccagtatttaatctttgcgtatctctgctggaagattttcttccttggtcagaaaaacttccagaaaggagcaatccctgtgttgcgaaagtcttggctccattgattatatcgatcatctgccaattcttgcggttatgttctgcagaatataaccgcaaaaactggctattctgcgatacaccccatgatgcccaagccagtgccatggtatatatacgatggtggagatagctaaggcaaatggagtaaatgtctatcacaatttatgtatacacagcctgatgcagctatcattgctcgattccttattggattcaagcagttgttttaccatttctatttgttccccattcttaatgtggaaattttgaatgattcataaaatctaacattgactctgtaagttccgtttgtcttttaacattttccttgataggttctccgatcagttctcccatcggcaaaccttcaaagtcccctaatccaccagaaatagcttctattttttcctcttttaattctttttctacttcttccacacctgacgcatttttccttatatctctgatacatttatccttccttttttgttggcacattcattcccacacatccaatcacctggtttaaaatcatcaggattaattggagttccggggagcatcatggaaaaatcttcatctcttccaataaaattctcaattctcccccttatttcatcaaacagattcttatctcctaccgcaacatcgcacaatttttcgtcatctaagttatattccttacctaatttcccatgttccaaatcatttcttttcaaaacaattcccccttttgtctttacgctcatttctacagttgtctattttgtgatacaccataacatttctgtttttagtcttacatttttattttatcacttgtttcactgtatttttctttactttttcacatataatgatctataaactataaatattttcaagaggtctacatggttatttctatttttcaacgttataaaattcgcaactggtctaccatccaagtaaaatatgctgatacttccaaaactttaatctccatttatagattttagtaatttacagccgttccactcaccttctctataatggtttttatactacttttcctttttataatatattacaattttccatataaatataaagaaaaagcacacacaaataatgtaaacacagacaaaatagtgagtacctttttttatcatcctatgtgagatcatagactcatcattataaagtccaaaaagtttagtactcaactttttagacttagctacaagaggtcaacaaggcattagatcagatccttaaggcatccgctgaaattccacaaatgaactttataaagtaggcaccgcctggaaacaggcggtattgcctaactgactgatggcagaaagttaatcaaacgagcgtcaactgatataagcaatctggtgacagctcatgaaatcactaacaataataactctagaatattcttccatacttattcgcccgcatctttgctttgcagcacttctatcatttctttgtaaatatctccaacttatcgcaaaatgaacttagcccaattccttttcgcacatttcaagcgccgcctcaataaccttatccatatcgtagtacttataatttccaagacgtccgccaaagatcacattcgactctttctctgccaactcgcggtatttctcaaacaatgtattgttctgctcgtcgttgactggataatatggctccattcctacgctccactcagaagaatactctctggaaataaccgtcttctcctgtgtaccgaactcaaaatgtttgtgctcgatgatacgtgtatatggcacttctctctctgtataattcacaactgcatttccttgatagttatctgtatccaggacttccgtctcaaaacgtacagaacgatattccagcgctcccaatctataatcataatactcgtcaatcattcccgtaaatactgtcttctctgcaatatccagattttccttgataaacgcaaaataatctgtatttgtctttacgtcaatgccatccagcatcttttctacaatcttcgtataaccacccatagggattccctgaaagcgatcattgaagtaattattgtcgtaagtaaatcgaaccggaagacgcttgatgataaatgccggaagattcttacagtctcttccccactgtttctcagtgtagccctttactaacttctcaaatacatccttaccgaccaaagataatccttgctcttccagattctttggctcagtaatacctgtctctgccacctgctcagcaatcttttccttcgcttcctgtggcgtgcggatattccacatcttactgaaagtattcatattgaacggcaaattataaagttcatccttatatacagcaatcggagagttaatgtaattattaaactcagcaaactgattgatgtattcccatattttcttattggatgtgtggaaaatatgtgcaccatacttgtgcacattgattccttcgatttcctcacaataaatatttcccgcaatgtgatcacgcttgtcaattacaagacaatttttaccctttttctttgcctcgtgagcaaacactgctccatataatcccgctcctactataagataatcatatttcatattgtttctccttcaattaacgaatcgtctattataaactattttatttttcataagttacttatcgaataaagtaatcccaaaaaatattattttcagcttcaccagcaaaattatcactactaagcaatatatctgccgaagtatcgtcttcctcaacttgctctgcttgattgacagaaatatttgtataagttactgtacgtgctaattcatgtaacggagtaatacttccaattaaaactataatagaaaccgcacctaatattgctttattattttcttgtaaggctttttctgttgtatctatgaataaaagcattaaaataaacaatggaggaattgaggctcgcatacaaaaatcattagacaaaccaacatgaattggtggaattaaaattagcaacaatataatatagtaatacagcaaattttttttattataatgatacaataaaattacatatacaccgatttcaacaactagaaagataatatacttttctaaattatttttcataaccggttctatttctttagaaagtactgtcatacctgatcgattagacattaaatataagaaagaggttattcctactataccaccaccaataatgttttgaaaagtaaaagtatctttaatcaaagcggagaaatacttttttgcttttatttttctacttaatacaggattaatgtcatattttcgagataaacataaaaatacaataatgaataataaccccacgaatggaaaagtacttgttaacatgcaacatgccaatataaaaactaaattcctattatttttttgagagattgctaacattgtacacaaccatgcgggaatggcttgattaaatacccaaaataattgtgttgtcatgcttgaatattgataagctgtactccaccattccaaatgttctgtatttggaatttggaatatattatttccaatcaaaaacatccctactatatctaacccactaaacaatatgagtattccaagtggccatacaagtatttttctatattttgaacatatcaaataatatacaaatgaaatgccgatcaatgcccaaagtgcctgagcataataacctattcgtaatccaaatacttttcctattaaagcagaaggcaaccaaaatccaatataatatacaagccctgatttagatactcctggcattttagattgtattacatcataattaacgactggccaatcaaaagtaacaagaatattaaatagcccatttctcgcttcatgatcagtattctgaaatacaaatttcccaatacctgaaaaataaacccatagagcaataacaccaataataaataagattttaataatattatcttgcgtcatttgtggtaaccaaacttctgtcgattctttacatattttaaaataacatattataagtaacagaactatcggaattgcaatatatatctttaaccatcctaaagaaaaaatcaaaaatggaagtataagatagccatatatagctgcataaagaccttttgataaatattttcgcattaacatataaatctccatttcagttaaaatctattttacaaaaatttttttataaagtactgcaccaaatctgaataaggaaaacttggttattcttaatgctaatatagcaatatttctatttgctttaaatacatcaagagcattactttttattgatttatcaaatttgtataactcattttttacttcagatgaatatggaaaacttaaataagttgaatacaatccggaattaaaccaagcaatatggcgacagtagtattttctataatttaaacttaaattactttttttctccttataaaaattaatcaaatattctattacctctttatattgtaagtaatttttttgcttactcttgacagatgaactttgctcattgtatccataaagataattcctaacagtaatattaagatatgtcacagtttttacataacataaagaatacaaaatatattcttgatcgacataaaaatgatgttcatgcaatctcacttgattatcaaataagatatttgtttttatacaataattatgaataccaatccactgattattagccaatactggtatcttagtaatataattttctaataaaaattctttattaactggaaaacttttaaattttttatgatgtaatattttgttatcttcagatacataattaaaatcaaacaataccaaatcagaatctattttttttaatttaaaaactaattctttaaatttctccgaatccatccaatcatctgcatctaatacacaaaaatacttacctgatgcaattgaaatacctgtatttatagtggaaccatgcccaccattttctttgtgaaccgctttaattgtattcggatactttgcttcaaataaatcggctatttctcctgtattatcttttgatccatcatctacaattaaaatttctatatcagataaaatatcttcaatcaacatagacggtatacttctatccaaaaatttctctgcattatatgaaggtactacgatacttaatattttcttttccatatttaatctcctcgttttttcttttttactaaacttacaatattacataacacacctaatatctcaggctctttcataattattagtacgatacaataacatgaaaaaaataacactccagaacataaaacaataattatatttgttgtacctcgtaaatttctgacaatccagtagcttaatattgtagataaagaacaacctataataatatatttataattcatttttttataaacggatacaacatattctcttgttgcccagaactgtactagaaacacacatatttctgctataagtgtaccaatagctgcaccatatgcagcatactttgggattaaaagagcattaataataatatttacaatggctccacaaatttctgaatataaaacccagttttctttccctaatggaactaacatttgtattcccataatattagtcataccaataaaaataattgttggcataattacttgcattatggggactgccggtaaaaatgccctaccagaaatcaatgatgtaatgggacttgcaaataacatgcaataaacagccaacgggactgataaaagtaatatacagtttaaggcctttgttgtaattcgcttaaattcatctttcattcctactgataaataatatgatactcttgggagcaaaacacttcccaacgaagaaaccacagcaaccaaaagcatttttatttttactgctgcatcataatatcccatttgagtatcattcgttaaaaaacctagcataacaatatccaagttcgtatatatcgttgtggcaatcgacattgaaaaaaaaatggatataggttttaaatgtcttttaatattatatatgtattctgaattaggctttaaatctacatgtttccgcaatgaaataaaattccacaaatatgaccctgatgaagcaataattgtaatacccccatatataacaacatcattttgttgatgtattaatataaaagttaatatcaatgcaaatactttcataagaattgaacgaactgcaatttcttcatattcctctagtcctcgatatacccattcaactccgatgacatttaagaaaatcataaaactcataatcataaataacggtttattttcagaaagctcaggaactttaaaaagtgcaatagcgaaagcaatgtaaataaatatgctggtaataatattaataaataatatttcttgtactgtctgagacaacttttttttatcatcacgaactattgcgcatgctctaataccataagttgggactcctaacatggcgaacattgtaaaatatgttaaaacagatgttgcaaaagaaatttcccccataccttccggcattaaaattctcgagacatatggtgtcatcaaaaatggtaagatatacgctgaacccatcagcacaatattcattacaaaattctctttaattgatttcgttgctttcaaaatttatcctctcttcttcaactactaatggcttatgcattactctagtgttaatattcattacatattcacctaacaatccaataaaaagtaattgaatcgatcctagaccaaacaccccgattacaaccggtatcattcctgctggaaatttatcccaccatattaatttcataataaaatatgtgatggctactataaaacttaatattgcaccaatcattccaccaaatgtagcaatccgtaatccaacctttgtataagaagtaatactgagcattgctgcatcatacaaactataccaattattatgagtttttccagcgcggcgtcttggttgttcatattcgatttcttttcgtttatatccatactctgcaacaacaccacgtataaatggaatcgggtcatccaactgacgcaacaatttcacaaagcttttatcatataaaccgaatccggtaaaatgttcaatcatttccacagaagacattttccgaatcattttatagtaaacactccttaagaaataaataaatccattttctttactggatgttttaattccgcttacaattttatatcctttttcccattcctttacgaataccggaattagttctaccggatcttgaaaatcacaacacaatgaaatcgtacaatccccacttgtttgacagatcccataatatggagaattaaattgaccgaaattagtaacgttcaaaatcgctttgatttttggattccgactacatatcattcgcagtaaatcccgcgttttatctgtagaacaattgtcaataaataaaatttcataatcgtattccggaagttccttttggaatacatctaccacagcctcactgataggaacaacattctcctcttcgttatagcaaggtatcattacactaattgttttcatttgttttctcccaatacctcattttgataccattcgattgtttgccgtattccatctttaaaagatgtctcaggctgaaatccggtatcttgttgtagagcagtaatatccgcacacaagcgcattacctgattctcggcataagggatagcaccaaaagcaatctcagcttcaggtgctattaaatcccgaattgttgttatatactctgaaagcggatattctttcccacttccaagacaatagactgctccgtctttccctttttctgctgctaaataaaatgcttttccggcatctttgctgaacagataatcccaaaactgctcaccttttgttgtctgagggatctccctcgacaaaagctttttaatcgttgacattaccatcgtatttggtccgtcatacggcccatagatacttaaaacccttatccagacatgtctcatctccaactgatgacagcgcagataagacatcattcctgcacacaattttgccatcccatatccattctccgggtatgctggtgtagtcggttgtaaaactccttccacacggccatattccgcttgggaacctgcacctataaagcaagaacacccaagagcatgcgcgacctctaccgcatccaaagtatagcgaacatttttttcctgaagaatgatgtcatttcttccttttccaattgtcccggcccatcctaagtgataaaatgcatcacacgttggaaggttcatagaagataactctttcaaattgctcaaatcacatttcacaatccgaaccatcgaacttttaggaagttgtgaaatgcgcttcgaatttggattgcatatggcaatcacctcaatattatgttccaacatctgttgtatgattgccattccaattgcgcctgtaggaccggttattataattcgtttcattcctatcatcccatctaattacttttttgtaatgcacggaataaacatattttcctgcaattcctcttctggtaagaacggtgcaaggtcctcaagtggcggactaaacaatgttccatccggcaatcgttttgttgcactctttggctcaaagaactgttccggtgaaacaaagatttcacagaaaacagcgcctgttgtatttaatgttttatcaacagcttctttcatttcagcgttattgtgagctgcaaaatacggataaccgaaagctgttgccaatttttcaaaggacggaaaactcaaatcaccactttccggtccaattccaattttagtatgttcgccaaacagatttgtctgtgtctgacggatggaatgatatccctgattgttgataaggaaaatcttaatcggcaatttatttgtcaagattgtctgtaattcctgcagattcatcataatacttccatcaccttccagacaaattgtcacctttttgtcagcagcaatacatgcaccgattgccgctggcaaaccatatcccatactggcaattgcactgttaatcaaaaaacggctgtcttttttaatctcataattatgactacctactacacaggcacttccattcgatacaactgtcagattagattccggaagactgctgcttaagtagtttacaaaagcatatacattggcatatttcccgtcttcttcccaatgctttggttgggtaaccggatacttttttttccaattttgacacgcattaatccatacttcatccataaaaagtggggaattactctgagattccaatttgttcacaacctgtacaaagaaatcctttgcatctccgcaaattggaaattctacatgaagtgtggttttcttcaattctgccgggtcaatatcaaccataataacttcagcttctctagcccacgtctgccaattatagccgacctggcgaatagacagcctgttcccaactgcaagtacaagatccgcattctgcacagcaaagtttcctgctcggtctcccataataccgccacgccccacatacagcggatgagcagattcaatcgcatcaatcgaatcccagcaggttacaactggaattcctaatagttcaacggcttttctaaattcatcatatccacctgacagacgaattccatttcccgcatataatactggcctcttggaattacaaattttatcaagaaccacgtcaatcacttctgatggaattgtttctgccacttcaaccatttctttttctggatcaaatccaatcaattcatcagtctcaattgtgcagccctgatagttcactggaatatctatccatgaaggaccttttcttcctgacattgccatgtagtatgctttttctaatgcataacgtatatcttttgggtcttcaatcatagtggaatatttgcacatgcagttaatcgatttcgtaatatcaaattcctggtctcccactgcgcgaagcggaagcccgtctgtaaactgttccatataacgtgcggttgtgtcataacgtacctgcccggaaataacaagcataggtatggaatccagccaacctcccactacaccggtaattgcattggttcctcccggtcctgttgttacacaaagtgccgcaattttattatttatacgtccataagcttcagctgcaattgcacttgcctgttcgtgatgactatatgtacaatgaatgccttctttatgaccaattgcatcattcaaatgcatggcgccaccaccagtaatcatgaagcagtctgtaatcccttttgatacaagaaaatctgcaacataatctgctaatctctgtttcattttgtaatcctcctataattagagagtaatcgcctctttgattgtttttgccatatagtcaatcatctcatctgtcattcccggatatacacctacccagaatgtatcattcataatacggtctgtattctccaaatttcctacaacacggtatccctcaccagttgcacgcatttcatcaaaacatggatgcttgatcagattccctgcaaagagcattctggtctgtactccacggtcttccacatactgaacgactttgtttctgtctatgccttctttacatgtgatcaggaagccaaaccagctcggagaagcattttcacatgcctctggcaaaatcaatttatcttcaacacctgcaagagctgctttcaaacgtgtaaagttctgttttctgcgttctacaaaagtagggaacttctctaattgcgcacaaccaatagcagcctgcatatctgttgctttcagattgtagccaaagtgggaatatacatacttgtggtcatacccaagcggaagctcaccatactgtctatcaaaacgatgtctgcacaggttgtcctgtccagaaccacaaacacagtcacgtccccagtcacggaaagaacgaatacacttatttagtaatgaattgtttgtgtatacagctccaccttctcccattgtcatatgatgaggcggataaaaactggaagttccgatatcaccaattgttccggtgaacttttccactccgtcaatggtgtacttagagccaagggcatcacagttatcttcaatcaaccacaaattatgtctgtcacagaattcacggacactcttcaaatcaaacggattacctaaagtatgtgcaatcatgactgcctttgttttctcggaataagcctcttccaacaaattcacatcaatattatattgcggaattgttacatctacaaataccggaatcgcaccatactgaattatcggtgtaactgttgtcgggaaacctgctgcaacagtaatgacttcatctcctcgttttaccatccgctctccgagaagtggagaagtcagtgccataaatgcatttaaatttgcagaggaacctgaattcactaatgagcaataacgaacacctaaatattcccccaattttttttcaaactcatctgtatatcttcctgaagtcagccagaattctaaagaactgtctaccagatttatcatctctgcactgtcatatacacgagaggcataggaaattctatctccctcttcaaatacttttttctgattgtgataagtgtcacaatattcttttaccagactgaggatttcttcctttgcttgttgttctgttttgttttcaaacattattttttctcctttgttcccaagttcttaattttcttcaaaaaagtcttttatctgtttgtccatgcattctgcaacatttcctttttgcagatatgtttttgaccactcaattgttttctcaattgctttctcgatatgccacctcggattccaatcgaatacatatttcacttttgaacaatccagttttaggaaatttgcttcatgcggtccacccacaaatttattttcccaacgagcatttccgccccatttcttacagaaaatgttaaccaattgtcctgttgttacacagtcacagtcatcaggccccacattatagaatccggcataagaagcatcttcatattgtttctgtgcaatcatcaaatacatttttagcggttccaacacatgttgatatggacgagtagaatgaggatttcttacaataattgcctcgttcttctccattgcccgtacacaatctggaataatccggtcattcgcaaaatctccacctccaattacattacccgctcttgccgtagacacggcaactcccatttcctggaagaaggagttaatataactgtgtgttaccaattctgaacaagacttactattagaatacgggtcatatccatctagtggatcaatttccctgtatccccattcccattccttattgtgatatactttgtctgttgttacatttaaaaatgactttacacacgggtgcagtcgaacacattcacaaatattcactgtccccatgacatttgtttcataggtatacacagggtctttgtaagaatctcttacgattggttgtgcagccaaatgtaatacgatttccggttgtgtctctataaagacctttttcagatgttcgagatcacggatatccccaattacggaatgcatttcactacctataccacatacctcaaataaactcggagtggttggtggttccaaagaataccctataacatcagctcccgcatttaccaaaatcttacataaccaggaacctttaaatcctgtatgccctgtcacaagtacttttttacctctataaaattccatgttcataatttactcccacaccttccacggagcatttccagatgcccaatattcctccaacatttctttttcacgctgtgtatccatgcactgccaaaatccattatgtttataggcattcagctgtccctcagcagaaagtcgctgcaatggttctttctcaaacacagtagaatctccttcaatgtagtcaaacacttccggctcaagcaccatgtatcctgcactaatccgactgccgtctgcactagatttttcgcggaatgcagtgatatctctgctttccttatcaatgtcaagtacaccaaaacgttgtcccacgtgaactgctgtcaaggtagccaattgtcctttttcctgatggaacttcaacagtgcattcatatcaatatctgccacgccatccccatatgtcatcataaatggttcatttcccacatacttctgaatccgtttgatacggccgccagtcatagtctgtaacccggtatcaaccaacgtaactttccatggctcagatacattattgtgaataatcatcttattctcgcatccgaaatcgaatgtaacatcgccgttatatagataataatctgcaaaatattctttgatcatatgttgtttgtatccgcaacaaataataaactcattaaatccataatgagaatattccttcataatgtgccacaaaattggtttttccccaatttcaatcatcggctttggtctcaaatgactttcctcgctgattcgtgttccgaatcctcctgctaaaataacaactttcatagtcttttcctccgtacacttacttatttttcttaagttgataccttaaaaaatttatatatacccttttattctattcattgaattacaacatattgtagcatattttgacacaaattactagttttagaaagttcaaacaaaaaacacatcccttcttgctacccttgcaatacacctataaatcagccaatcattgcacaaatacaatatgataatcttaaaaatccagttttaaacaaatttgaaaatacaaatgtaccttttctgtatacacccgatgcatcatcccatgaaacaagacagtattcatcatcctcctcacacttaaggtactgtattttttacaactggaatacgcttcataaccaatacaatcatcacgcaaatcacatatatacaaataggacttatgaacctccatgtataagaatatggatctaacattgttatcttttctaatttacgatatacaatcatgtgcatcaaatatatgccatatccgcttcccgcaatcttggaaatccaactcctggttttttcatactttattatctcattccacggtatatacctcacaaaaacaaaaactgcacatgcaaaaaaaacagtaggaaaattcaaatatccccaaaacgtagtatctaatgatgcattttttaccgaccaaattactgttgccccataacgaattccagccccgataattcctaatatatatattctaattctttgcttcttattgatttctgatgtagacaacaagtatcctaatacaacatataacaaatatccccctgctgtcggaaaaataacttccccgtttattgaaatatttaataatttacagcatactggatacacagaatatatcaggaatgctactgaagccatatattttaatatctttcggttatcttttatcaaagatacaaccggaatagaaagataaatcataaaaagaggaataaaaaaccaatagactccttcggcagttgtattattaaacaaatcaactatcgtccctacattccattcccattgtatctccctttcgtatagtttaatcaccaaactaattaacgtccatactacaaatggtattacggttttttgaattctttttataaaaaaaatgtatgtagagtatttttctctgtagcccaacaacattgctcctgatatcataaagaaaatcggcactgcccaatatgccagtgtctctatcaccatactttctttccacgcccttgtgttttcatataaatgaacaatgccattgcaatgcataaatataacccctaggcatgccgcaatatttaagatatcaatgtactcatagtgtctctttttcatagtgtttctttctcatcccctactttctctaatttttaataatgctttttacaatgtcagacacaaagtcttcttttaacaccaacaaaacaactccatatactcccaaaaataaaacggccgacacacacaatgtccctaacacactcatcgatattttattctgaaatatcactccagctatagatgcaaaaagaattgcaaaaactattttccaaacttgaatacgttttaccatttcccacaactgctttctcaaatacatacactgaataatcagcaccagcatttctgccatagttgttgaaaacgcagcccctgctgctccaaactttggaatcaatatcaaatttaataaaaaatctaaaatagcacctgccgtcactgaacaaaccacatgattctctcttcttaaaggcgtcaaaatttgaattcctgttatattggacaaccctataaatagcactgttggcattaagataatcatagatgctgttgccggcaaaaaggactcacctgcaagaaataatatggattcttttgcatacagaataaagtagaccatcattggcacagacactatcagtacaaattgaaatgcttttgttaccatcctctgaaattcctgtttcttttcctgttggatgtagtaggaaagtctcggtagtaatactgttcccaacgaagttacacaagtaacaagaactgtctttacctttatccctgcattgtaatagccaacttcgacatcccctttcatgaaaccaagcatcactagatccaaattcaaatacacgctcgtcgcaacagaaagtaagaagaatgttataattccttttctatgtcgctgtaaattatattttccctgctttttaaatgtaacaaacctgcgcagccgcaagaaattaagaacatacgaaccaaaactccctatcacatagactgctccatagatcacataatcttccggttttttaacaagcaaaaacataagaatgagacctataattttaaacaagactgcacagacagtaatataagagtactgctctaaagcactataaaaccattgcaccccaattgtcgtcagaccaatactggctcctataacaataagcagttctttttgtcccttaaactgtggaactacaaatagaaaaagaaaaaaaactccatacgtaattgctgttgtaattccgctgataatcagaagttcctgtactgtccgtgaaagttcttctttattatctctcactcttgcgcactcgcgaatcccataagtcggaattcccaatgttgcaaacattgtaaaataagaaacaacggatgtcgcaaatgccacttttccacttccctctacaagaagaactcttgatatgtacggaaatgtaatcagcggaaataaaatggacgagaccgtcaaaatagcattcataatgaaattaaattttactgttctgattctcatttattgttctttttctccttactctttgaaaaacgaaatttctcaaacttccatttttcattaatatatacagtgaatccacctctgaatttcaccttcattgtaacaaaaaaccaatacataagtgcaagcaaaatcagtgttgtcacaaaagtctggctaactccctgcaaatagaagtatccatcgattggatgaaatacaatcgtataaactatgtaagaatacaatactaaccaaaatcccgtattcttaaaagttctatattttaatttgttgtaaaaaacactcattgttcctgccatcactccctgcaggatcatcgctccgatatacccaaaatcatagatccatctgcggtatgccgtataaatatttccaaccatgacatccccataatatctaaattccaagtgaatcggataaaatttatctaagttcaataagcctaaattatataattttaaatttaagttataaaaagtttcttttccaaagatttctgaagctgccggtggatgtttgaaaaactgattcaaacactcaatagaacagccacagtaaaaggtaatatactccagcaatccttttgtgttaattcttcctacgaggctggcacttaaatagaaaagaactaatcctccacaagcggcaattgctaatattccaattgttttgatagagatatatgctttcccggtatggtatgaccaaatcaaaaagtaaataacaattcctccaactagaatttgaagcatctgtaatctgtctgagactaaaaatccattacagagatgcagcaaaaccggaagaagacacgctcctaactttaaagctttttcttttgtcattcttctccctgttgcaacaagattattgacaaaaatatacaagaaaatatacgcgcataacatagcgattcgctctacctgtccgagccaccatggcaatgattcttttaaagtaactgaagttacttctttaaaaatattaagtgcttgcgaaagtgtgttgaattttccatttctgcttgcaatttcaatcatattgaaatacaacaatgcaatataaaccgcacaaaatgcacttgcagctataattttccaccatggaagatcaatttcttttactgcgattttttttctggtgccctcgtatcttttcttatatttcctgtcaatcgcaacaccaatcacaacaaattccgctgctccgattaaaagcacaaaaaatgtcattggaatcatagaaattccccatcgttctacattaaataatgcacatcccacactcactatgtacgccaacaaaaatagcagcgccggagtaaatatgtctttattcacttttacatagagtattccatataagactactaagagtccaaataataaataaatcaacataggttcttatttcctcctattctaagttctctatctctctcagaacttttcgcaacatctctccttttcgcaatttttctcccatagcagacacgttctgaagcatctcgtcatatgttttcccggtaagcgcagccagtttctctggaatctctcttagagaccccacctgtattcccaagtgattctctctaataaattctgctatcgctgctttctcccatacaataaccggaagcttacttgccaaatatagtgatgttttatgcggattattgtactgcatatattgcccaaattctccgccacactcgtcaatactttttccatcccacacaagtccaaatttcccgtgcaatacacgcggaaggtcatctggagggaaagaacctttgtaagtaatattgcctgttccaatcgcctctgtgttcagatttgggccatataagcgaaagtctgcattcacctgatccagctgatacacatatcccgctttttcttccgacaagttccctgcaataataactgcattttgattctcttttgtttcggctttttggatactttccgcttccaccagataatcaaatatctcaagagcatgtattctcgtatccaaccctatttttttgagatatccgatcatctttttgttatgagcgatgacatcatctgccagacacagaaatgtcttttctgcatgctgataccattctttttgctttttatcttgtgtcctaagactttctatatcatgaatcaagataataatctttactttttttctttttaactgtttgatatatctaagcgccaacattgcaacctttggatacatctccaatggatactggatcaaaatctgatcttcttccttaactgtttttgtaaccttcctccagtctttcatcagaaccaatcccatccggatccgctctgcataacttacattctcctttacgaccggagggctgacacgcagaggattccatccttctttgatcagtgtatctgccacgtcatttcttgctttagaacctgcatgctgttcgtttaatcccttttctacaatacaatattttttcacactgatactccccatatcttaaaatttcttttttaattgctctatttttttctcctgatgattcaagtcatatcccgcacagatgatctcctgcagacgagattttctttcttttccccggctttccaatattgcatttctccacaatctagtatcgccaagtttcaaaaattccacaagatctgaaagctttgtctcctcactgatctgatctgagagaaaacacggaagacctgctgcctgagcttcgactgcaacaatcggcagaccttcataaaaggacggcaacaaaaagcaatctgccgcctgcatcagtcttcgaacatcttttctgactcccagaaattttactttgtcggcaacccttttttgtgctgcataattttttatttcttgttccagttctcctgttccgacatataaaagtacacagtctttttcttcctccagacagctgctgaaaatatcgatcacacctttcggatttttttgatgtgcaattctccccacatggcagattacaaagttctctttgatccccaattcttgcctgacttcttcccgaacgattggatcatatgcatatgtttctgcttcaatcgcatttggcatgatcaatacatctttgtgctccataattctttgtccaaacataaaacttcccgcaagctttgagcaggcgacaaattgttttgcaataccattgagaaacggtctgcaaattttatgaagtctttcattatctgctgccccattatgactgtgaatcacaatctttcttctgtggatccatggaatgatcaaagtaaagacagcacctgcattcaaaatatttccatataccgtctgatactctggatgttcccttagcaactttctaaatttcttccactgttttaacaatccctgacttttggctccaatataataaatcctagagccataacttttcaactcctcttcatatgcaactcccggaaaatctgtgacaaaatccaggacgatttccggcgcaagctcttttgtcagattccgcagataagtctcaattcctcctggattatctgacattccatataccaatactctttgcttttcactcatcttaacgccctgccttcactttggaataaaaaatcggaaattgatttctggcaatatgaattgctcttgcaaaactcagacagagaaatctactttttgtcctcaggatccgtaacgcaatttttaacattctgctgtcagatgccttggcatccatcactaagtccaaaaataatggatctacaaataacttcctacaccagtcttttcgatcccgatgcgacatccctgaacgtggatcgcagtttctctccatggcagataaaatataccttccatacaggctcccaagaatctgtctgttttcttctgtatctgctttccagtaagtgcattgctcatacaacttctgaatccgcttccgcaaaaaatgatagtaatctggaacaaattcatttgtcaggctgccgttcactctctttgcatagtgataaggggcaaaatccaacaagttcatactgtctatctccatacaaaattcaatattaaaacagatatcctctataaactttgcatctttatagtcgtcaaaagtaacccccagcttcttcaggtattgaagatcatataccttattccacggatatccatacagtgtctctctctccatataaatcaactgctggtgaatctgttctggatctgttagatacatttcttcaggaaccctgatttcattgtaagaaaaattcccctgccggtcataatattccacaacaattccaaacagtacaagctttgcccggttcttctgcagcgattgatatactttctcaagcaggtcttcatcgaccgtatcatctgcatctgcaaaccacagatattctccatcggcctcttggatccctcggtttctcgcctcgctgaccccacaattctttggctgttcaattaagcggattctggaatcttttgttgcggcttctcttacaatctcttttgtacggtccggagaaccatcttctaccacaatacattcccaatctgaaaaagtctgctttccaatggatgctaacgtgtctgcaatatatttctcggctttatatgccggcattacaatactaaaaaatggtttcatacttacttctctgtcaactccctaatcaactctacaatcttcttataagactctggtctgtcaaactgctcttcagcaatctttctcgcttgttttcccatttcttcccgcacatcttcattctcgtagagtttctcgatcgcatctgccagaacttcttcatcttccggcataatattgactccaaatccatctgtctctactttctttcggaactccggactcatgcaagtattgatcatcggatgtccggaagcaaggtaatcaccgatttttgtgacgatactctgcggtgctttctttacaaacgaattgacaacaatgtctgactttgcaagatatgccgccatcttttcgtatggcatatagccgacaaactctacatttttgcagtgatgctctttagccagctgctccaattcttctttcagcgggcctccgcctagaattttgatcttgatattcagccttcttcttcggatcaattcttctccggtcagaacaagtgtccggatatcataacttgttccgatcgttcccgcataagtcacccagaattcgtcctcttctttttcgatctccggactgtatttttccacacctgcatcaaactctttgatttcattgccgacataaacggtcacttttggaacatccaacttctggttttttaacgggcgatcccggtattcatcagaagttcccacgattcccgatacaagcgaatatactttctccgcatctctctgcagcggatgaaagatcatgctgctcacaaccggaatatccaataccatacgcatcgcttccggccaaagatcattgacatccggcacaaatggaattccttttttctttgcataagatgctgcagcaagcgccacatcgtttggaggaatctcacagtagatcaggtcgtagtctccttccttctctaaaagtgctgtcagattctttgccgcaactctgtgactatacacccttttaagatcaatgtttttcttgtatcccggttcatagataaattttaaatgaaatttatattttgttttctgtatttcggaaatatttctctgtgccttttcccaatgctgaaacgttgtcgtaatcagatcgacctcatatccggcatccacaaggaactctgataaaaacttaaacctcgtgtatcccttctcattgttcagcttcactcccattgtaatcactgcaattttcttcatatttctgctccaataaactttattttattactgccattgctgtccgcagcataatcttcatatcactgaaaaatccaaatgtctctatgtacttcaaattgtatttcatcttttccggaagaatatagttgagataaatctcatctacatctgtgattccttttgcccgataggcatcaatgatttcatcttcatctttatattcaatactcgtattcgatgtgattcctgccggaagaagaagcgtcgcctgcatctcatccgtatagcagtccacatattttttcacttccggtcttgtccctacaaaagtcatatcccctgtcaaaatgttaaacaactgtggaagctcatccaagcgcagtttgcgcagtttctgtccgacctttgtgattctgctgtcactcttttccgtgacaagaggtccttttttatcggctcctgtcaccattgtacgaaacttaaaaatacgatatggtttgccataactagtgattctttcctgacggtagaataccggtcctttgctgtctattttgatccaacatgcaataaaaatcatgactggggacaataaaatcataaaaataaaagcaagaaacacatctgctatgcgcttgatgcgcagggcagactttttcttgctcaaaattttataatatttctttacctcatcatttctcatcttttctggtaattccgaccaactctttagcataatccgtgttccctcaataacctctgaaaagtatctattacatgttgctgctgttcatctgtcagacaagaatgcagcggaagtgaaatttcattttcgtacattctgtaagcatttggaaaatcctcgatggcaaatcccatatttttgtatgcggtcaaaagcggaagtggtttgtaatgtacgtttgccgcaatttctgcttttgccagttcctggataatctgattacattcttccctctgtttgccattcagccgcacaagatacagatgtccatttgactggcttccttctccataatggttaagcacctgcacttgatatggacgaaaagcctcatcgtatctctcgatcaactgccttcttctctgtaatattttcgcataacgcttcatctgcgcaagtccgatagacgccgtaatatctgtcatattcgctttatagtacggtgcaacaatatcgtattcccatccccctgctttcatcttcgccaaagcatcttttgattgcccatgcagtgtcagcaacatatactctttgtataacgcttcatcctcttcaggcgtcaaagacttccatgtcacagcgcctccctccgcagttgtaaggtttttcactgcatgaaatgaaaaacaggtaatatctgcaatctgtccacactttttcccttcacgctctgcgccgaaagcatgtgctgcatctgcaagaatcaagatccttcccagcttctcctgtctttcggatgacggctgaaacaatcctttcttctcttctacaatttcaaacagtctgtcataatacggataaataatccctgcaagatcaatcgtaagaattgccttcgtcttctctgtgatagcttcccgtactttctccggatccatatcgatggaatccggcatcgtatctaccagcacaggggttgcccccacatggcagatgacgctacaggtcgctgtaaatgtatatgctgaggtgatcacctcatctcccggtccgattcccatcgcccgcaatgtcatctccatacaggttgttgcagaacttaaacatgccgctttagtcgttccacaaaactgtgcgatttcctgctcaaacttttttgtcttcggtcctgttgtaatccatccactttttaaagtatcgatcacctctgcaatttcttcctctgtaatatccgggggcgaaaattctactctcatacttacctctctccatgttctctgtttaaaaattcactcggaagtgttgagcgcgtatctgaaaaatctttcatcaattcactcgcgatcttcctgtctctctccacatcttcctgtctgatatgataggttggaacgattttgtggacaatctctttcattccctcttcttctgcataagctgcccggtacaagtcttccagatctttcagaaattgatcttcatcaaaatcaatcggttttccaatatgaatcaactcattcgcagtactttgcagaccttcctcgctcatcaataattcttcataaagcttttctccaggtctaagtcctgtaaatttaatctcaatatcttctcctaccgtgtatccggataaacgaatcagatttttggccagatccagaattttcaccggctctcccatatccagtacaaagatctctcctccctttgcacttgctccggcctggagcacaagagataccgcctccggaattgtcatgaaatatctgataatatccgggtgcgtaatcgttaccggtccgcctgctgcaatctgctttttgaaaagcgggatgacacttccattgcttccaagcacgtttccaaaacgtactgccacatattccgtcttgcatctgtggctgaaggtctgtatgatcatctcacacatccttttagaagctcccatgatgttggtcggattgactgccttatctgtagagatcagaacaaacttctcaactccgtacctatctgccgcaagtgcagtcttatatgttccaaatacattgtttttaatcgcctcgttcggactgtcttccatcagcggtacatgcttatgcgcagctgcatgatagacaatatccggtctgtattttgcaaaaacactgttgatttttctactgtttcgcacagaaccaatcaaaacaaccagatccagatcagggtatttatgcttcagttcctgttggatatcgtatgcattattttcatagatatcaaaaatgatcagtctctttactccatttgctgcaatctgacggcacagctcacttccgatgcttccgcctcctccagtgacaaggacaactttatcatacacatatcttcctatggtctctgtcttgatatcgatcggttctctgccaagtaagtcttcaatctccacattgcgaagcttctgaacgctgacatccccattcacaagctgatataccccaggaagaatcttcagatctgcatcggtattcttacaaattccaaggatcgcctggatctctttctttttggcacttggcattgccaaaataatctcattaatcttatatttttctacattttccagaattttatctctgccacccactacttttacaccgtggatataagttccggcttttctcggatcgtcatcgatgatacagcaaatctttgcatcgagctgtttactcatttcaagttccttcatcacaacattgcacgcctctcccgcaccgacgatcatcgtgcgccgcacgttctcactatgaacactgcttcgatagatcattctgacaaatcgataggaaaatctgccaatacaagtgcataagaacagaccaatagtgtaaatcacaaagtaacttctgtagatttctttgtaagtcagaaaataggctgccgcattaaaaagaaaggaacctatacatgcctctccaatatagaggagctctttcgcacttgcaaatctccaaagacttcgataaagcctgcatacggtaaaaatcccgattgtcacgatcgtattgggaatcatcatacttcgaaccgactcccaatattccaccggaactgctgacagttcgaagcggacaagcaatgccgcaacggaacacaggttaataaaacatacatctaaaatcactaatgcaatctggtagattgccgataaatcccatttttttaaaaactctctcatttgcccttatctcactcttttctctattgtgcaatctcggagccttccaatgtctccccattttctacacggtcgatcagtgatcgaatcgtatcaaccgatgcctgatccggctgcatcacataaagtgctcctccgccataagagaagcagacctgctcatctcctgttcctgcagcagccacagaataaatattccatgcttttccctgggcgagctgatctttgatcaaatcctgaatctgatcctgagacatattcgtctctacatttccactgacactgttgataataccgttggcattgaccagcatcgccggtgagatcatctttttgatcagacctgtgatcactgcctgctgattttttcccctctgattgtctccgccttcgatattctgtctttcccgcgaaaatgccagcgcctgctgcccgttaaaatggtttgttccctgagcaacatccatgacaagtccagaatcttcactggttgtaaatgcaaactcggactctacgtcaaccccgccaagctgatctacgatctcgatcagggacgtaaagtttacacgcgcatagaacggaatctctgtatcataaagctgtgataacgttctcatagaagcatctactccgtagattcctgcatgtgtaagcttatctttctgtccaccactgattcccggtatctccacatagtaatcacgcggtgttgtcgtcaaaagaatctgatgtgtcgtcggattgattgtcgcaacaatattcacatcgcttcgactgtttgtctcaattggtccaaacacatcaattccactgataaatacactgaaagtatctttcttcacctctacctgagctgctgtattgtccagttcttttttgatactgtgctgataaatgaccttcacgttctttgaataattttcaaatgcttcttccagaattccggtatatccttcattataaataatcgcctgtacctgtccatcgtgcagtgcctgcgcctgctcacttaaacttcgatactccacggtctggatctctgttcccagtttttcattgatatctgcaactgctgatcggacatcgtctccactcatcgcatactgaacaccaaatgtatacgatgccgcatcttcaatcttgtctgctccgtcgtctgccagcactgcaactaccatattatctactttataagaaccacctgagattttacccagtgctccatttgcctttcctatataatatgtcgcaaataacagtagaatcataatgaaaaagctgaagatctttcctccgatatgccttccttttttccggagctgggttgccagcgtaattccaaaaagaagcagtaatatcacagcaatgattccgagatattctatcggcagcatatctagaataaataacatgaccataaatactactgagaccagtccctgcagtcctgccagaatcaagccaagcacatcctttttcttaccttttcttacagtttctttccggtttcccgatgattttttgttagttcctgatcctcttctatctcctgccatggattttgccggattatagtaaacttcctccagctcctcccggcttttttccggtcttctatttccctgtggttttctactatcttgcatccgcctgctgtcccgaggtcttctgttatcttgagatttcctgctgtcctgaggccttctttgtgttctatgctcttttgcgggcatttctctttttcccataatccatcctttcttccaaatttccttttttcatcatcactctgttttcttctaaaacatctaatctattgctatcctatgaggatttctatctaaccccatatccaaacgagtatagcataaactatagtaaacttcaaattctttccaaaaagctcagaccttgtacctgcctttcacttttcaaaaaaagtggtcttcttttcggtcttaaactctcagacttctctattctgcctctaccgaaataaactggaatgttgtcacatcaaacaatcccatatctgtcagtttgagctccgggatcactgcaagcgacataaagcaaagtgtcatgaccggctccacttccccacagattccaagttctgtataagctttctcatgaatctctgtcagtttctggtccacccattccccacttctgtcactcatcagtcctgcgatcggcataggcatttcttcgatgattttgccttcttttacaaggacaatgccgccttcctgtttgatcagactttctaccgcaaatgtaatctcctcatcactgacaccgactgcaataatgttatgggaatcgtgggccacagaaagcgccaccgctccttctttgatcccgtatccttttaagaaaccacatgcgacgtttccggttccctgatgtctctccacaaccgcaatcttcacgagatctttttgaggatcccggataaattctccgttttcatctactttgatctcctcaactgtcttctttgtgacaacaccacccggctgtatctcaatgacatttacccggtccgacttcaagtgcatttttaatttctctttcgaaaaatctttgacgatcacacttcctctgactggcgcaatatctgcatacgatgtctccggaagatatctgccatcttctgcggtcagtttcccgccaatccacactttttctgtctcaaattgttccagatccttcatcagaacaatatccgcctgatatccaggtgcaatcgctcccttttcacgcagcccaaagcattctgcggcatttaatgttgccatacggattgccgtaatcgcatctattccctcttcgcgacagatccgcaaatgattgtccagatgtccctcttgcagaattgtctttggctggcggtcatccgagcatagcagacatcgtctgctgttctgccccgttaccccgcgaagaagcgtcctcagattatgacacgcagatccctgtcttagcaaaatgtacatccctcttgccagtctgtcatccatctcttccaccgtagagcattcatgatctgcaagaatccttgccgccgcataagcattcagctccttgccactgattccaggtccatgtccatcgatcacctttccggcccgctttgctacaagcagtttctcaaggacactatcgtctgccccaatgactcccggaaaattcataaattctccaagccccaggatcccctctctctgaattggctcttccatctcagctgcaccgatcacagcacctgcatgctcaaatggcgtcgccggaacacaggacggaaccacatactgaatatccaatgcagtcctctccgctgcctccatcatataatccagccctcggatcccacagacgtttacaatctcatgtgggtccgcaatgattgttgtcgttccatgaggtactaaaagccgcccgatctcctccggtgtaacataagaagattcaatatgaatatgactgtcaatcagacccggaaccgcataagagccttttgcatccacaacctctcgcccttcatattctccaattcccgcaatcttagatccactgactgcaatgtctccgctgataatttctcccgaaaatacatttaccactttacagtttttgatcacaagatccgccggaatccttcctgctgctgtatcaatcaattttttcaattcttgcttgtccatgttttcttccttttctatttattttgctgttttttgcatgcttctgcgtaaattatagcatatccttatttcaccctcaaccgttggcagacaacggttatttcttttcacaactactttttacatatctctgatttttactcttcggcgcattcgggatcgtcatttggatctgcccactctcaagcgccggattcagataattttttctcagagcatctttggatttcaagtgaagcaactctaaaatttcattcgctgtataaggaatgtcttcttccatcgcttccaggagtttctttacatattttgaaagactttccaccggttccttcggttcctttttgatctcatccagtgcaatctcaatctgttccaacataaactcaataaaacccgtaatggttctctccatctggcagatagaaatcgcctcataatatcctccctgcaccctctccatctgggtttccaacggaagataggaaaagaaaggtctccactttgccaaaatcgctgtctgccacaactgtgccagtctgctgttaccgtccgtaaatgggtgaagaaacaggacttcataatggaagatggaagacaaaatcagcggatggattttctccctctgactttccatccatgcaaaaagctcctgcatctgcccctcaataaacctcgccggcggtgccataaaaaactgattgtgattaaacacacctttttccgtctggcgaaattctccggattcgcttgcaatatccttcgtcagaattccgtgagccttcttaaagtccgcaatactataagtctccacttcctgcatgtattcataaaccgcgtacatgttctgaacttcccggatcactctttcactcaccgataccggccgaccctctacaatctccttgatctccggaaccgaaagctgattcccttccatccttaaagaagcgtggattgcacgaattcttctttcccggtttgttcccgacatccctactttataatattccataatccttccggatttctccgcaatcgatgccaccagcattactattttatctgtaatttcatatggcggattgtaatttcccataaaatctctcctttatcttacatcttttcttacacattatcttacatgtttttaagttttctttttgtaatattatatgcgctttttctgtttttctaattctgatttttctcataaacatagatgtaatgttacttattatttctatttatcttacatgttttaagtttatttagcacaaaaaataacaggtatcgtattcctgtattttgtttcaaacacttttcattcatctatgtaaaccgctgtaatcattggtatttccatcttttctacttcttttcaatggtgagaaaatctaacctattactttcattaactttttaagaaagcaaaaaagcacctcatcttacgcacttatcataccacacttcacctcatctgtctaaggctaaagaaacctgtcacatgccatttacatcatacatactttttagcagattacttttataccttcatagacgtttcaaattcagcagcaacattgtacaacaaatttcagaccattttgcaaagcggcaatgtgagttttctttcagatcaggcaggtttttaaatcgactttcagatagtgcctgcgcctttaaaataatatctgtataatgcctgtataatgtctgtgcgaaattttcgcaaaaaaacgcccggcagagactctctcttctttcaaaaaagttttcccactttcttttcaaagagtttctttctgccaaggcgtattttctatgttttttgccaagtatattttcatcacgctgtcaaacgccgtattttgcgatataagcaattttatcgtttcagccaagacttgtatgcctaccatcattaaaacctcttatatcgcattctattgcattgttttttacttaaattctaccttttcgaatcgatacttctgtttcacctcgggatatttttcccggtccacctcactcataaacatcccatagggtcttgcacagatcttaaaaggcggatacatcgcctgatagatcaccagcttctctcctgtctctgtgtgctgggcaaacgcaagtaccttatacagatattctgctgtatgctctgatacccattcccgcttaaagtgctgtacaaggtccccctctctgatatccctccgcacagtttcctcctctttcggctccggttctgtgtcgagttccatatattcttcccgatccagcgaaaccgggattcctgattttcctacaatgtgaaccccgccataccatgtcccggtgatctgaaaaatgtctccaacttgatattccgaagtatattcatcgtttttcttaataattcttactctgctcatcctttttcctttcattaattctgactgcgctcgcagtatagaaacagacaaccttgttatccggtttatatatcgtatttatgctagtattatgccattattccctgcctgatacaagacactattttgattctacttctatttttaattttttacaattcccctcttgactgtacagttactgtacattttacaatgtgccatgttgatcatagaatccattcaacaaagattctgttgaatattacctcgtgtgatacaaagtaaaaatacagatttaaaaaatatcgaactatgaaaggagaatgaaattgagatgaaaacgattttaaaacatgtaaaattcaaaagcaaacaactggtagcgctgttttttctgatactactatccgcttttggtcaaatgctattacctgcattactatcaaaaatgattagcttaggagtggtcacaggagaaaacagaaccatttggatgttcgctgcaattatggccggggttgccgtcttttcttgtcttatcagctttggatccgtaaaaattgcctccggtatttccaccagttttgccgcacagctgcgagacaaagttttctctactgttcaaagcttttccgcagctgacttggatcaatttggcacagccagcttaatcacccgaagcacatccgacatcacaaatgttcaaaactttttgacattgttgctccgcgtaggacttctcgctcctatgatggcaattgcaggattgattttctcagcatctacaggaggaaaagttagtttcgtacttctatttgcgattcctgttttattgattgtactgacgatcattatgatttttgcatctcgttattcgatacgtctgcgcagcaagctcgaccatatcaatcatttgtttttagaaactttagaaggtgtgcgtgttatcagagcttttaataaacaaaaaacagaatgcacacgatttgaaaattctaacgaagattatgccatgaccgcaatgaccgccggaagaattacaagtatattaatgccggcaatcagtgttattttcggtgtcacaactgctgcagtgctcggagtcggatcctattatgttgaactaggtgccatggaagtcggttctttagtagccaacagtcaatacattagtatggttctcacttcggtgatgatgttatccatggtgatcatgatgtttcctaccagttatgcctgcgccaaacgcattgccgaagtattgaacaccaaaagcacaattgtagatggttcctttcctttggaaaaaagacctttgcgctccactgtggaattccgcaatgtgacatttgcttatccgggagcagatgagccagttttaaaagatatcaactttatttcaaatcctggtgaaattactgcaattatcggtggtacaggaagaggaaagtccagcattgtaaagttgatcccaagattatacgacccattgtttggggaaatcttgattgatggcgtaaatatcaaagattattccttaaaggatctgcgttctttgattggatatgtgccacagaaaaacaaattattttccggaaatatcgcagagaacttaaacttcggaaatgaaaatggaaatgaaaaagattggaaagaagcagcaaaaatagcctgtgcaaatgaatttatcgaaaagaagcaatccggatttttcgatccaatcgctcagggcggaacgaatttgtccggtggtcagcgccagcgaatggcgatcgcccgtgctattatgaagaaaccggaaatctatgtttttgatgatagtttttcagctttagatatgaaaacagatcgtcaattacgtcaaaacctgaaagaaagtattggcgatgcctctatgattattgtagcgcaacgcatcagttcgatcttgaacgcagatcgtattctagtgattgatgatggaaggattataggcaatggcacacacaaagaattattagaaagctgttctttatatagagaaattgccgaaatccaattaggaaaggagaatttataatatggggaactttaaaacttttcaaagattattctcttatctaaaagagcaccgcctgaaacttcttttcgtaatcctatcagctatcatcagcacaggatttatggttcttgctccatttttgattggaaaagtgacaaccaccttatttgcaagtgttacagatggtgtattttactggaacaccattctctccctattagtaagtttagttgctttatatttcatatcacaactatttacttttttacaaggtttcataatgtctaaaattacggctaaagtgatgcaaacacttcgccgggagatcgacgaaaaaatgcacagaatcaaattgaattattacgatactcatacccatggtgatattctgagcatcattaccaatgacgtagataccatcaacaacacacttagtcagaatttaacttctattgttactcaggtcactaccgccatgggtgttttactaatgatgattgccatcagtcctactttgtcgatcattccgattgtaatggttccactttcgcttttcagtgcagcaggagttatgaaagcaagtgaaaagtattatcagcaacagcaaggactattaggagaactaaatggatatatcgaagaaatatataatggacaagatgtcgtacaaacttttaattatcaagaacgagcaaaaaatcacttctcaaaattaaatgaaaaattaaagatcagttcccaaaaagcagaaacaactgcaggtgcgatctcaccaatcacaacattggtcaacgatttaggatatgtactgtgtgcagcaatcggctgtctttgggcaattatagggaaaattaccgtcggtaacgttcaggcaatgttagaatatacttggcgttttgcagaaccattttctactattgcaggaatggttggcagctttagcgctgcaaatgctgcgggaaatagaatatttgcattactagatgcagaggaggatatagcagataaagaaaactgtatcgttccgaaatccaacaaaggatctgtatcttttgaaaatgttagttttgggtattccccagatcaccttttgatgaagcgtattcatttaaatgtacttcctggacagaaagttgccattgtcggtccaaccggtgcagggaaaacaaccttgatcaatctgttaatgcgattttatgaggtaaattccggttccatcctagttgatggtgtcaaaacatctgacatgactcgcgaggaactgagaaatcgttttggaatggtattacaggacacctggcttttcgaaggcacgattcgtgataatattggatatgccgaggatgatatgcctatggaaaggattgttgcatcagcaaaatcagcctgtgcccataattttatcaagacattgcctggcggatatgaaatgatgctaagcaaaggcgcagaaaatctttctcagggcgaaagacaattgcttacgattgcaagagccctggcttctgatcctgaaattatgattttagatgaggcgacaagtaatgttgatacacatacggaactgttaattcaacgagcaatggcagaattgatgaaaggaagaacaagttttgtaattgcacatcgtctttctactatccgcgatgcagatatgatcctttatatggaggacggtgatatcaaagaggtcggtactcatgaagaattaataaaaaaacagggaaaatatgcaaatctgtattttagccagtttgaataaaaactttctaagggagcatatcacatttctgatgctcccttttcactatttcaatacaacttctttcattatccctgatttcagcaaaaatcccatattttttgcacattgtattccaactattttcgcttttccaagtacttctatacacccttccccataggtacttccagctggtatatctatatctgcaagttctgctttctctgtcccaagaagcgcaaatgttgttttcggacaaagcatcaaaagtgtatgttcatctgagtactcctgtgcttctttcaaaaaatcataagtaaatccttctaccatctgctctgccatcttcgggccaagtatattcactcctccagccgagtctgcataactgatgaaatctaccccatatttttttgcttcttttatatatcccaaaatttgcgtgccaactttgtggaatacagatttcataaattcgaaatctttacgcattcctttaaaaatttgtttaatatcaatcaacacattgagaattgtaatggggcctgaaacttcaagcatcacatgttctccttgttcgtgcagaatctgacaggcctgaagaacttcctgaattcttccttttgtaaaatcaatttcattgatttccccaagctccttataatctgtataaagatattcctttgcccggggtcctgcaacttcattgccgagtgtgatgattcctcccatagcttctccttctacggtatggcaaaaaggcagaacacagatcgaatttccttgtttttctttttgccttttggaaagcgcagccatcttgtcggcatgtaaatatacatcaggaaatgtaaaccccagttcttccacgattttggaatgctctaatacaccattatcgtaggtacatttaaaatctttaatgctgctcatagttcttactcctactctatttcacattagggaaaatcaaacattcagaaaacaagcgttcatagttttctgttgcccctaactccatataatccatctgtccggccagttcttccatttctcgttttacttttgcggacatcagagccatataggcccctgtctttgaagagtttcctacataaacaagcttttcttgtacttcttttggaatgattccggttcccaccaaactatccgcaggaagatgtgctccaaactgtcccgcaatcataactttatccaaatcttccatttggattccagctttcttaagaagcgctaaaaatcctgatagaatggctccttttgcaagttgtacctgccgaatatctccttgcgtaatcaagagtttttgttcttccgataaaataaattctctttttttcccattttcctgcagcatgtgaaaacgataatccgattcttctaatttgtttagcttgataaatgctccttcttttctgacaagaccgactctcagcaattcctttacaactgctaaaatcccacttccacaaatgccgattggcttttcatttccaattactttccattctattccggattctgtgatcatcacatcttcaatagctccttctgctgcccgcatccctgaactgatattcatgccttccaatgccggacctgctgcacaagaacagcaaagcaatctgccatgactggataatacgatttccccatttgttcctatatctataaacagtacattcccagattctttttgaagctgacatacataagctcctgctacaatgtcggctccaatataagcggataccgatggcaaacaatacagtctcgctccttctgctgcacataatccaatttcttttgccctgatgtcttttccacgtacaaacacaggcgcatacggagatcttccaagtgatgtcgcaggaaccccgagtaacatatgcatcattgtacagtttgctccaacagcaatttcataaatccactctttggatacttctgactggcaacaaatatcctctatcatctcattaatagaatttaccaatgccttttgcaatttttctacgccatcttcaggatgttctaactcataagtaatacgggtcaacacatccagtccaaaatgcttctgtgcgttgatcatggatgcatgtgcaagttccttgccggtaagcatatcaatcaacgtgcagacaactgtcgttgttccaatatcaaccgcaaccccatacattttttccgtcgtattgccctcttctatttgaatcacttgatttccatggagtacaaccgtcacctgtcccggaacaaactccctcatctggaggcatcccagctctagacttgctttcgggatctgacgcagaatctgatcctcaaaagatgtttgatcttccaaagttggtttttgaatttccaccacaattttttggatatcctgatcgaacgcaaaagaagggatatagcctccggtcagcacttgatgcttcctttccttctgcataagctctatctccaaatctgtttccggttttacaaggcaggaaagtctgactccattttccatctcctcttgctttaataacttccgttcggtatcttccggttccgataattctccttccagaattcgcactttacacttcccacaaagtccttttccattacaaggattatctacgaatataccttcttctaagagaacttctaaaagagtttttcccacttcatattcatatacgttaccagaaggctgtactttgatattaggcatttttcatctcctcttctttccactcttccatcgtttccattttttcaaatgcttcttcgtccatctttaacgtttttaaaatcgcctgaatatttgcaagaggtgactttgtccccagtccacatgctggagaaatgatatcagaaccgctttgcacacaaaattttgtcagcttttgaactctttcttcatctccaaactctaatgcgaatgtacttacatttcccatcaatactcggtcttgaagattctttctggcttctttcaatggaacgatcgcatcaaagctcaacgcatctgaatgcactttatcaatctgctcatatacacttctcatctgcccacaaatatgtacaatcgtacctttttcttgatctttgattccatccaaaagcatattcagatattttactgcatactcttcaaaaaatttgggtccgagaatctctcccgttccgcttggatcagaaattgcgatcacatctgcgccgttttcaatcatcgcatttgcaaaggcaatcaattgttctgtcacaaaagtcataaactgatgtgcttcttctttatgtcttctcaaatctttataaaatcccactggatcgatcacagaactggccacacttaccggtcctactaagtttccaatgatcggaacatctaaattcttttcttttaaaatacggattgcatccaatactacttttgctctcccgcattccaaattgatcagagatgatttttcccattctgttacagatgttcccgcatattccgttacatgtggttcaaaaatcttagatcctaacgttacttttgcacccagttcttctgcttctattgtcatacaaaaaggaactcctacgttttcaaagcaaccatgttgataacttgccaatgccaaatctgccatcatctgtgcatctgtatgcgcttccggccatgtaactccacaaacatccatgagatctgtcgtgatcatattcatcattcccccaggacagatacatggcggacgatccacttcttcctgtctcaaagcgcgttccaaacgttctttttccgtaaacatacattttcctcccattacttacgcaagatctaataatctttttgccagttttacagcttccactgcattcacggaatatccgtccgctcctatttcattcgcaaacttctgtgaaaccggacttccaccaaccatgacttttacttgatcacgaatcccttgttcctttaattgctcaatcaccgttttcattccaatcattgtagttgtcattagcgtagaaatacagattaacggtgcttggatttctattgctttttttacaaatgcttccggtggaacatctcgtcctaagtcatacatctcaaatccagctgtatccatcatgatcttcactagatttttcccaatgtcatgagtatctccctctacaactccaattaccgccttcggtttttctccgctttgtgcactttcaggaaggtgtggacgcagcacttccaacccagcatacatagcatccgaacaaagaagaatatctgttacaaaatactcttcttcatcataaagatccgaagctttattcatgccatctacaagaccctccataatcccgtcaaatgccggataacctgctgcaatatattcttcagcaacgtcgactacctcttcctcttccatctccaatacacattccgacagtttttctaataattcttcttttgactttgccattttcatttcctccaaattccattcccttttcataaaatataagcttatcttttcttcccgtataatctagctgcttccataaaccaatctactttttcaggtgaagttccgtccggaatatcacaaccggtcgtaagatgaaatcccttctcagcagaacttccaagttctatgcatttttgaacatctgcaaaaatctcttcttttgtaccattcagcatgctctgtacaggatctacattgccggcaattggtactttttttcctaattctcgcgcagccctgtccaaatccacaatattgtctaagctaatttcatttaactgatattgttcgatatacttccaaatactataggtagccccacacatatgaagagatactttctttccggttctctccagtgcatagtctgtcaattcttttgtataaggaaaaacgaatttctcatataattttggtccgatcagcgccggatttgccacaggatctgccatcgcaattcctacgccatattgtgcaaatgcatcaatacagctcttttgggaatccacaataatgcgaagtaatttctgtactttatcgccatttcttctacaatcgcgtaaaagcagctcaatctctcgcaaaaatgatgcaattgtaaggggacctccaatgcttatctcaacaggaacaatctctcctgcagattcttggagcatctctgctgcctgtaaaaatctttgaattatcaaatcatttcttgcatttacaggttctaagtattctaatttactgtaatcatccaaaacaagacttccttgtttcttatccggaacctgatctgctaacgcatctgatatccctcttgtattcggtccgattcctaatctgtcaaaaccgaatctctgataagacatcagttctgcttttaccatattttctgcagaatcccaatattcttccggtgtcattccccctactttacatctgacattgcctataaatggtacactcggtattctgtcataggataatccatgctcgtatgcatagatacgttccaatgaagtcatttcatccgcattatgtttttccaatctcataattaccccctgcctttctcttaaagattatcatgattttcaaacagtatcaatcgtttcctattttcatttatagattttttctatatgtagtaacttcttattgcttttatcaattttactttgtctaaaaatacttctacaatagaaagtgtgaaacttatttctataggaggaaaaactaatgaaaaagaaacttttaagcttgttgctttgtacttccatgcttgcaacacttgcagctggctgtggaagcaaagccaaggaagcagacaaaccaaaagaaggagagcctactacacttactatgtggctgcctcctctcgatgaagacacagaaggaaactttaagaagcttcttgccggatgggagaaagaaaataattgtactgtagaaatggaaatcattccatggggttcttatgaagaaagatggtctacaggagttgcaggtggagaaacacctgatatcggttatatgtatgtggaaatgtatcctacttatatctcttccggacttgtaacagacttatccgacatggttgaagaagaagattacaaagaatatctcttcctagatcgtggtgaaatgatgggtggattatacggtgttcctatcgtaaccggtgtaccattcgtcctttattataatcaggatattttagattctatcggggaaaaagctcctgagacatgggaagactttgctcgtatctgtgaaaaagctacaaaagacacagatggcgatggtaagattgatcagtacggatatgctgtaggtcttaatagtggaagtatgagtaacctttatgttttaaattcttatatgtatagcttattatggcaggctggcggagatatctacacagatgatctgaaagaagtagctttcaatggaaaagctggtgtagaagccttagaatttttcaagagtttacagccatatatgccagaaaatgcaatgtcactttctggtcaagatgcattctctacagtatttgcagaaggcaaagccgcttttggtgtaactcgctcctctgcttctaatgaaacaacctttgcaaaagattacccaaatcttaaaaactgggactacgtaacttctttgaaacataaagagtatggtacattcggtgctgctgactgtctctctgtaatgtctacatccaaacagcctgagcttgcacttgatttgatcaaatacattacaggtcctgagtttatgacagaatatcacaaagtagctccaggtgcccctcttacagcaagcgaagaatatgtaggagatcctaaaatggaacgtatcgttacagaagatcgtgataaatggcgtccattacaggctggtccttgcggaagcgaaattcttgaaaactacgcagctcacattcaggctgtcatggaaggaaaacaagatgtaaaggcagcattagatgaatctgcatcctatgcaaacgacttgttaaaagagtactacgcggaaaacgaataaaaagaatcgaggcacttatgaaaaaaaagaaaggactatccgtccttgcgccttatctttatatcgcaccaattgcaatgatcctgcttacttttgtagcggggtcattgattcttgcaatatattttagttttacaaaatataatatcatcacaccggcgcaatttaacggattatttaattatcaaagactatttcgtgactccaaattacatctttgcattatcaatactttaaagattgctgcaatcatcgtgccatttgaaatcgtaagttctactctttttgcaatactaatttcttctcgtaaagataccgtgcttggaaaaattgcaaaggcagcccttttcgttcctgtgctttcttccagcgctgttatcggtactgtttggaacacaattttaaatggtggacatccggcagtaaaagtgatctttggtgtatttggaattgatcccacacttcttcttggcagcagtaaaactgcttttattgccgtcgcctttatcattgtatggaaaggtatgggctattatatggtaatcacgcttgcttctcttacctctatttcggatactttttacgaggcagccaaagtagatggcgctacaaaatgggattgtttaaccaaaattacattaccacttttgaaacctactattatcatgaacatttttttatcaacgataagtgctatgcaagtgtttgatatggtctatactatgaccggcggcggtccatcgatgtctactacaacattgagtatgtacgcatatcaactcactttcaaaggaaacaaagccggatatgctatggccgtttccaatgtactgatgttgattgttttaatcatcgtattattccaacaacgctttattaaacacgagaattcagaaatataaaaaggagaacatgaaatgaaaaagacatctcgtttactagttgatatttttctaatcatcacaatcttactgtgcattcttccttttttatacatgattctcatgtcattaaaaagtactgtgaatgcatatgattttgattttgctttatcaaaactcaccttaaaacattataaaaatatttttacaaactcaacattcctacgctattttttcaatagtgtatttgttgcaatatccggtgtgcttcttacattatttacaagctgtactgctggttttgcatttgcgaaattaaaattccgtggaaatgataaacttttctttctgctgattttatcgatgttagttccatcgggtgccatacttgttccactttacttagtcgtacgtggtcttggctgggtcaatacgttccgcgctcttattttacctctgccaactgcttttggtgtatttgttatgagaaatgctattatggctattccagaagaactcattgaatctgcaaaaatagatggagctactaccagtaaaattttacggactgtcattttgcctttggtaaaatcttctatgctgacagtcgcaattttcacatttattggcgcctggaataactttacatggccactcattatcactactgatgatgcttatcgtacacttccacttgctttaaaagcaatgcagacacaatacgatacggatatcggacttacaatggcttgtgcaacctgtacgttccttcctccatttattttctatttgttcttacaatccaaatttgaagaaggaatgtccatgagtggactcaaaggataaaaaaatgttggaatcatgatgacaactcatgttccaacatttttaattttttaggaagcagaacttaatcttgctatttctttatttactttatttcgtaatgcaatcaaatacatatctgattttggatatcgcttaaatgtaagtggttcatccaaatcttcttcgattaattccattacatattctttacttgtcaggctttctaacaattccaatgctcgcaaatctgttaatgcttcgtaatgaaccatcatgcgaatggattcttccggatgcccgtctgctcccggatatacaaggaatggatcacctgccgggaatccattagatgcatctgtcacctgatatggattaatgtgttcataagaatgctgactattgtagaaattatacccccaatgtaaaataccaataatgtcatatttatacagctgaattccataaatgcggtttctggcagatggcattgacataaaccggttacttacttcataaaactgtcctgtacaataatatgtccacatgtctgtaagaccatgttctaaaaattcttcaatctcgttatttcccggaattggtttgctgatcaaaccgtgcttataaaattcatagctggaaagtgcatcaaatgtatggaatccatctaacatattgccaagagattcttttgcagctttaaaagtctccaagtgttcttctcttggttcatctgaaatatggaagtatgtcacttctgcaattccccactcttttaacttctcaaccagtctcggaagaaatgcctgtaaaaatcttgtatattccccaactgccggtgtatgccatccaaaaatccgctcttcttttccatctacgagagccataacttttggtgcatactttgctccccattgtgagaatagatgagacatttcatagtattcgatcccacactttttacaaaggtctacccagcgtttcattttatcaaacccaaaatgatattcgccattcttcacttccacctcgatgagctgagtcgttgtacgatcattgcccacttccatatctaacggataggtaaacaatggaaccatcatcatattacagcctcgatctacatactcgtggaagtaattttccagtatctcccaatgcttttctgaaaaaacatccacatgataatagtctgcaaggcaatctgcgtggaaccattccgtatgcataattttctgttttggaagatgaacgccgatcactgtaatttttctttttgcagaacatattacagcatcatctttcacaagctgaatttcaatctcatagtctcctgccggaatttcatccgtcagtttcacatcgatccacaaactactccactgatgagagcggataattacttttccatctttgatgtccttcaacaaatccggatagagtcctgatgtcgtttttaaataattatcatctacaattccatttgtagcacgtcccactggaacctgttctaccgttcgaacacgtacatactcagcgattggtgaaatgacttttacatctacgcgttctctcagaaaatgatttccggtatatgcaacctgataggatacggtctcgtcccaaagtccacttaattttacacattctggccgatacaccggttcttcatccggaaataccttcaccaaggagcttaacactttcatctgatactttacttctcttttttctctcattgttttattttctccttttttcttctcatcctattaaaagtatagcattatttttttaagaagtataattgatacattctatataagtatagttattatagtctttttctatatatttaactattttatataaaatgaaacttcacttccctgtgatctaaatccaagatctgctgatgcttgctaaagtcgtttcttttatcaaagcaatattcttaattctcaaattgattgagcaaaaaaagattatacaagcacttgataaaaacagaaaaataaataaatcaaatagaccctctcattgtattcaaaaaacagatattacggaagataatgaaatagctcaaaataagacctctatttttcagacaggataatcgaatcaaagtacatttcttaacccgcttcatcaaattattaatctatcatttatttgaaaagaagcttgaagaaaagtttatcttcagtcatcttttagaaaatttaaggaatatgaatattacattcttatctaaggacagtggatattctttcttacaattgaagaaacggctacaaatcccatatttatttactgggattgtaaccgtattttcattttttaactgtcaaagataggagtgacttgcattttctatattgatagaaaaaatattgaacatcatataccatcaagatatttcttatgttacatctctgcaatgtttatttttatttcttgttttgcttcaactgttctttaaataactttttcataacagatacaccttttgatgaagtaatatctgcttcgcttaattttccaaccttaaccatcttacaaacttctataaaagcttttcccattgctaatgtaacgagacctgctgtccctgctgaaatagctcctcctaccacacttcctgctccaggaaccaatttcaccaaattagtagcgattgtctttccaacaatagctgcacctcctgctccgataacagtagtaacaagcatttttagcccctcttttcctatattgattctatagataccacaaattgtcgccattaaagtaacttgctctcctattaaaagtggagcatctgcaaaaggaatcggaattgctcctgttgttgccgttgctgctacagcaacagcgacaacattttctgccttttcattcatttcagtaatttcaagtctttttaattcatcattaaattctctatccatgttataacctccgtctttttatcacattagaaaaaaattatctatatcttcttcactcttcaaaattaaatcatcatcaacccccacatctcttgctaaatttattgaaccatcaaaggcaatatttacattttcatcaaatgctaatttttcaagatctttaaatctttcaattgcttttcgaacctccataacaacttggagatactgaacatttaattgtaaatttaattgagcaatttctgcattgtaattttcaattatcttttgagacctcaaagccccttgttttttacataattcatatacaaattcaccagccacattaccgacaacagcaccaagaactggaattggtattaatacttgtccagctactgatgcaattgcactaactgaaacatctaaacaaactgtttcacagtttattataaaatcttcctcagaaactttactttcttgcaaagctttcacttgtgctgcaattccaaaggcagctgttacatatgcagatgccacattagcaggagttgccgtgaaattggttagcacatatattgctcctcctcttataccacctttaaaagtactttttccagaatcaataccaatatccttccagtcatctgaagaaaactcagaaaaatttttttccttcctctttttagccacagacatacagaacgcaactccaccttcaatagccgcacttactccagccgccttcattccttcttttaaggtaggttgagattcatcatatgcttttttccgttgctttttatcttcttttttaatgttttcttcttcttttttaaccgtttgatttgctgtaccctgttgaacctctccatatccaacaaccgccggatttatatcttttcctaacttcaatcccgtaattttcaagaattcatcaattttttttgcaagataataatctgaagtacttagttgtgatggattttttttatacatatcaagtaactctataagcttatcatattgatccttaggaatatcatatgagccaccatttttaataaaatctgggtatgtttccatatgctccagcaatgcatgttttccaaaaaatgtatttcttaaactattatagaatttcgattgaacctgttgtccattacgaagataatcttctggagcagttctaccaactccctgcaaagtatgatctttactcaatccttgaataattctcctagcattggcaatattaacttgcatatgttcagctatttctccatgcttagttaatggattgccaagaatgcgtgccggatctccaagaaatttttttatttcattaagttccttcattgccgcttctaaattgatatcctgctgccttagtttttcaataagttcatccagacgcgcttgattaagatatgtaatccaagatgcaattgcttgttcctgcgtactttttattgcacgattaacaccttctgccatagcttacctccttatgcaatagtctcatttaacaatacagacatacttcgtgtattattaatcaaagtgccaagaaagctcttgtcttcagtagaaatcgaattataattcatattcataaatccagtgattctattcctttgcttattcatgtcattatataacaactctgtctttgactttaatccttttgttttctcatttgcctcatccaatgcttcccttgcttttacaatttctttagcttctttaacagcctcatttgctattttcttatttttatttgttaatgatataagtgagactcctgtcgaggtagctgttatcccccatcctattgggcctgctaatgctaaaaacgcttcccctactgctaaacctgctccttctttcacaacaaagcctgcaaaagttcttccaatccatgcaacagctgctttttgagcagctgcaccagaaagtgcactaatggctgttcctgttgatgcagttccaaatgtggttgctatactcatcatcacggttggcgccatagatgccacccctataccggcagctgcaccacctgcgatatcgattcccgcttttaaagattgatgatatgctttttttgcatactcttctgtttcactaaattcaattaattcttttccaattttacccatttcagtgtcaaattcctttggtgtatttgcgatactattaataactcgttgaaccaatttaatcaattctacagatttctttcgaactgaatataactgttcacatgactttcccattgcttcataggaacaattgtacttctttaacatttcatcatgaatttttaatgcttccttttttaaattactgttaaacacaaaccgaacctcctaaataatttttatattatctccttgacttctaatccacatgtcgattccatccccaaatacttccgctgaaatcgtatagatgttctttttgccatcttcagataacttttgtttttctacttttgcagttggtaatctatccaaaattgattctacggaatagcctgagtactcaaaatttattttcctaagctttccaccatacataaactgtatccgttttctaaattctccttcttcaaatctgtcagaatatggaattctgaaattttcatctaatcttttcaattcctgtatcctatcaattcgataaatagttggatacttgtcatcctgcactctaaaattttctcgtacttctacatcatcaataaaagccgcaagataaaaatagtattctgaaaacataatagctaatggtcttagccttcttgttttaatgcttgatccgcgagtcccttgatacttaatttcgatgtaattatgttctttaattgcaagtcccaaatcccataatttatcaacaaaaacagatttgtgctgcagttcgatataatggaattgctcatttcctattaattcctttataactttttgatttgattccggaacacattgcataattagtttattcaacatcatatccacttctgatttcgtaaatgctctactatcaagaataattttgcatattgctaaaatttcactattactaaattttgattgatatatctcttttagatagtatcctttttttgttcggtcatatataacctgtctttcaaccccatcatttacaatgacttctgctaaataattacgaattttatctatatctctttggatacttctttcattcacagcaaatttaagagcttcttcatatttgttgatgactgcaccactcatcaatctagtatagatatcaagtactctttccaccttgtctacactatcttccacgcctctccctccttgtatcatttagagatatttatatattatcataaaacatagacatattatgtcattctaacttatttttaaaagaattcagagacaccccttcctattaaacaataccaaaaaataatagatacaacagagtatcataattcactgtaagggcatatattcattgataatatatatgacataataaatttcataaacaaagatgatattttaactatttgtcctccatccactgaaaaatagattctcagcatcgtttctttcaaccgtaaaataaaaacactttccataatcttcttgaaaaatagcatatactgcataatgtaaagatgcctcttttggttttaaaaatataatcttaagaccaaaaacgtcatctattattcgaaatgataataaaccttttatcgaaagatactcaatcaataccgatgtagagctctaactcattaaaaatgagcattcctaatgatggcatacagtcaataatagtgtactcattccttttcaattagttcatcatctaccatcttgctaacagatgtttgcaaataaaatctttatctatccgtattagttatgatttctatcatttaccgtatgttcaccaattaacagacttaatttttatgtatcagaatagctaacccttttggtggcaatgacactattttctgataacaaaaaggcggtgctcacaagtacaaataatacttatgaaaaccgcctttataaacaacgttccctgcgagaatcgaactcacaactagtgcttaggagagcgaacaggtggtgtcaattccggacaagaactatcattataagccctttaaagtcaaggcttttttctacttccgagtcaaatcaagtcaattcctgtcccccacatatatgccttagataagacctgtttattagcagaatatttgcatcagctaatacttggggaataccttcgtgtcaccaccattatgaaaaatatggctaccatcattcaagcattcgagaatgataaacaatatgaaattgaattgatttctacacatataataccgtactttagactggttgtctacggtgttttgactactaaattataattgcagcaatttttattttttccatgtcagcctgattttttccattttattaaggattgcctccttaatcacatcctgtagatatgccggattcagtttctttttcatatacgcaagatatgtatctttcgtttcatcaattaaaactgatgtaaaaaatctttcccaactgaaaaactcttcactatccacataatcatatggagcgtccaatatttccagcacatgattgtttttcagaattccggcagataaaatcagccactcaaaagactccggtaaatacaatgccacattttcgcatccttctattaaccttaatacccggtcaatttctgatccaaaagcagcgccatccgcaatgacaagcattctctcacttttatgctctctcaaataatgaaatacattggattttccattcatagtttcacatcgcaaatgattttcctgacacacataatcgaaaaactggtatccagaattactgtcttctgttattaccaattcaggtgttacgtctttctcatgagtaaacgtcccatatatccgataaaattcatggtagctctgcttcaatgttccatactttccagatgtccggattccataaatctcttccacactataaggtaaagtcggcagtgattccctcgttacaatcacataataattatctgttttctgaatttctccggcaaactcctcggtcttaataaaatcatttccctcatcaataaatacgatactgtcagtaatctccgccagctgtcctttccacaaagcgccttccagcacataacattttttatcgcatatcagatctaccggacttcctgtcggattgttcacatattcctgaatcatgtctacaagagtagtttttcccgtagcgctatcaccgcgaataatcgtcagatttctccgtagttcaaaatcatattttaaacgttttgttgatacaataaccctatgtttccctctcatcgtaccactcctccattagacaaattctcccgcaatcggtaccagttctttcatagagtgaacaatttcgttggtattcaaaatacggatcgtaaaaggctccttaccaaaatccatcaaatgccgcagatttaccgtcctgtcttccgattctgcaattttaagcagccatttcgcacagttatctccacaagttgatgcattgaaaattttatctttattaaacttaaaaaggattagcgttttcactccaccagataacccagttggcggaatctttcccaaaactggactatctatcactccactatccaaaactgttgacttatctacatcctgaatcatttctttcacaaaaggatctacaatccaactgtcttcataatcatatttaaaataagccgatgtattatatacagcttctttcatatcaccataataaatattcagcataaaaatcccttccttttttacgtatattgtgattttcattaagacttttcaggtattttcctgatctaaacatactctcctgcactatcaacatgttccaacttcaactttgctcccatgatacaataatatttcgctcataatcaacctccatacgaactacttttccaattatcacattctttttctaatgctacaaaatcaaggcaactctgtaccaccctattttcatcacccgattttcttttactataaagtactctcgcattctttattatcttcttctcgtttttacgaatataaatgatctcttcgttgataagatccttgtatgccttatctggttcatttcccacatcgtagagttcaagtgcttcgtctggaactggtatcattgttccaatctgtaatgtacccttcaattcctttttctccccagtacctgctactattctcataacaataagagaatcttttcgaatagttttctttccgcccaccatgatataatcgtgcttatccttcggagaagatagcggtatgtaatatttatgtgtttctatctcaataacagctcccaaatactttcttgtatgtatacgtgtatcttccttatttgaatatactcttggaaatttctttctaatatagttaatgtattcatctgaaatgctatataatcgcataattaatttgtcctttctaaaaaaaagaagcatccatggatgcctcttgttgttaaactctccacttaaacggcaggagctctccggttgttaaaccttccacttaaacggcaggaactctccggttgttaaaccctccacttaaacggcaggagctctccgaaatgattacatcattctaatctagtatatgcaatatcgtaagaatattgcatatatctctaattacattctatcagatatcaatcttttttcaagtactcttgaaaaaatttttatgaccgccgatttctttcctcactaagatatctgtcactaaacccattccataataatccctgtggtatattaaacatattggcacccaaaaatataagtgtatttagtgtttttagtgtttttcaggcatttacctgatttaaacatactctccagcaatatcaacatattccaacatattatgaataatatcacctgtattgagaatttctatttcaaaatcctcatttccaaaatccataatatgtctcaaatttattgttaaatcttttgtctttgctatagacaaaatccattttgcacaatcatctccacatacagacgcattaaacacgtttccagattggtcaaatgccatcagcatcaatgtctttacagaacctgacagttcttttatggaaatcggtcctaataccggactttgtatcagatgagaacttatcacatctgacttatctacagctttaatcattctgattgataattcgtttgtaatccattcatcctgatatcgattatcgaaataagtcggaggatgataaatcgcattctccatattccctaaatatatttttaacatagtaatctcctccgttagacaaattctccggcaatcggtaccagttctttcataagggttatcatccattcctttattctttcgtccatattacaccccattctggatgaaactttcaatagttggataaaaactgctgtttcaaatatataatgcagcttcatcactcggtccttctacaataactgcaattatttttttctcattcaccgcgaacaccccgccctgcttttctaaatgctctggcaattttcaaactatcggtttcttcataaatttgttctgattgaccgcccaatgtaatgcttctgatatacatattgcgaaggttgttgctttcccttacgttcttcatatggatataacgattatctggattcgtagtagagaacataatgctttccttatcaatcatttcaagtgcccgaagattatgtgaagtgaagatcaattgtccttttgcactctttttgaaaatatcaagcagctctcccaacatatattcaaaaattccagaatcaagctcgtcaatcacaaggcaaatcgaaggatttccaaatgcctgtatgagtgcattcagaatagaaatgattttaataattccttccgactccattctaatcggaatctctttcataccctctctctttgacattagttccagcttccatccttcttctccattatccaatgactgtttcccgtaatttttaatcgttacctgcaatcccggaatgattgtgtataacacaatattgatctgttcaacaattgtctctaaccgattttttctctcctcatccaccagaattggttctgtcaaagaaactgcaaaatccccttttgctccaatattatcattttcaatccgaaaagccatcggtaaaacaaaattagcagaaatcactcctgaatgtgtattgcgaatcacaaataaatctttcaatgcaaattcaaacagagaagaaataataaccgagaattgttgaaatccatttttatattctctgcagaatatttcccgactgctttcaccaaaaatataagagcaattacttttttctgccattttacgtgctacaatcaaatctgtttttatttctttattttcttccagtatttcatccagtcttttctgtggtttaaaaacggcattcgcttgatctctttggtaatccataaatacagtcttattggttctgattccattttcattttttgcagcacttagtgtttctcgactgataacaacttctttttcttctctgctaagacttaatctgtatcctatttcaaacacaatatcatccataaaaatattgaaatctgcaaaaatttcagcagtatcggaatccatgtccatgtaatcttctaatgactgatccagatcgacccctatcattactttttgtaaaaaatacaaggcatcaacaattgctgtttttcccgaaccattttggccataaatccctagtatttccgctttatccgctgatagaattttatttacagtattcggcatatatatagtgcctttttttacatttttaatatttgtcaactgcaacgatgacaaacgaacaatcggccttctcatctttattcttctccttacaaccatcattccacactatatgttatgctataacgataccacaaagcattaatttcttcaatatttttctctgtttccgaattttttattcgttttctatgattttattttatttgtttttaacgtatctctcgtttattcagacaaaccctaaaccaacccttgactccctatttttatgtatttgcacattttttagtaataaatcacaccactaatatttcactattttttcactatttttcattacttcattgccttcgccaatgatgccagcaatgcttttatttccggattagacaatacttttgcaagcagctctgcatccacatcatccggcacatctactgtctgagttgtggtttcctctcgcatctttggatccagatttttcttctcatagaacgcttcctcgaataattctgcatttcgtcttcgatcctcatcaataatatgggaatatacatctgttaccatatccacctgtgaatggccggaatccccttgaaccgctttgatgtctcctccattcagttttaatttataggttacactgctatgtcttaaactgtggaagacaaccggaggaagattatgctcttcgatcagttttttcaattgtccccggattgccccggtaccaatcggatttccaaatgtcgttgccatcaccagattgtaatctatatattcctctcctagcacttcttttacttcgtcctgttctgctttccattcaaccaacatatttgcaacgctctttggaagaaacaccttacggatactgctttctgtttttggggttttcaaaatctgaacagttgtgttggttttgtgctgcgaaggaaataccagtaagacatcttttccctccagatcttttagcgattccttttttacccgttgtgtttccttattgatataaacatatgcacgattttcttcgattgcttccggagaaatatctacacaatcccaggtcagaccaagtaattcgcctaaccgcatggaacaggaaaatgacaaattgattgccaacttcaatcgttgatcttcacaaacatccattgcatacatcaatgtttctgccgtccagatttcccgtttctgtgatttatgtttcggcactgttgcatagatacacggatttttttctaacatctcccattttattgcctgctcaaaacaattgcggagtaatttgtgaatatctctgacagtactcgctgacacatattcatttctcttatttccctttgcctgatttcctactgcttttgtctgcaacaatccctgatagaatctttccataaaacgtgtattgatctccgaaagttttacagttccaatcataggctcaatataatttctgatcagactaacattcccttcgtaagtggacaatgcccatttttcttttccatatagggaaacgtactctgtaagcagatctgacaatgtattgcactttctaacaacaagcgatcccatttcctgtttatattctatttctcttttcctcttctttgcttctgcttttgtgtcatatgtttcccatttctgtttccgtttgccggaatcatccttatagttataaatcacattaaactttccttttcgttctctaatcgatgccatattaattccctttcctttctctttctttcagccatacttcaaattcatctctttttactctggatatatatccaatctttactgacgaaaatttcccatcatcaatccatttgtaaatcattcctctactgacctttgcaagaaatgctgcctcgtcaaatgtcagataaccaagatttccatttttgctacggtctccggttttggctaatttctttcgcctgtaatttgccagactataattttgttccattgacaattcttcataatcgttggccggatccaatttataatgatcttgtccatctaaaaatttctgaaagctctcttttgtaattcttttcttctctgcaattacaatcgtttcaaaaaaatggctgtatttagaattcttcaaaatcccataaacctgacttcttgtaattcccaaaagccttgccatttctggcatggtgattgtagcatcttccagttcctcatcttttctcctatctttctgtgtccgatactttgattgcttctcataccattcctgaaaagattttttcggaatcctgatccagtaatcaacagtaactgtttttataccgtcacgtttaatcagatcataaaccgtagtttcactaatccccaacattttagcaacttctgatatggaataagaccattttttcagattttttcccggtccttccccattcactttctgatacttcacctggtttgcgtaccacttttcaaagctggcaatcttcactctcatttgtcctgcgatttctctgcattcaaaataatttttctgaaccagccagtatctgcctgtcttctttagtcccaaaagatttcccatctctggaactgtcatccaggttttttcctttggaggaagtcgtttgtatttaccgttttcctctatttctgaaagcacttcttcaaacgaagtttcttctataacaacttgattcatctgatcgactctcctttcttttctgcatcatacatcattttcaaataaaaaattaggatgtcgattgcgactttttctctcaaccaacatcccagattttttactccggctgatgatcaagccagtcatcaaaactcttttttgaaattctgtactttccaccatccaactggatccaacgaaattctttcttttttaataatgcataaactgtcgggcggctcacatctaaaatttcctgaatttcttttacggtataacatcttttttctggcatataaaaaacccctctttcttctttcatatatgaaggaaaaatatccttctatataacgaaaggaaaaagagggattttacagggtgtcttaagatttttttaattcattcctacgagatgtattaaaaaaatgcacctatcatacaagttacggctgagaccaaactttctccaattgccatgcctgagaaaatttccattcttttattctctttttttctcatgcagtaggaaagtaatgcaccgcctcctaatgccaaaaatgcaccaaacggaagcataagtcctgcaatgatcgtcataggtgatatttttaaacgcaataacaaaaggcaaaccaaacaggcaataaagaaaactgtaaaatttaaatactcagggaattgaaattctgacaaagcagatatcaatccatccattgtcatcgcaagaaccttcgtgttcggaacaggtaattctgttcctccgattgtatttccttttgctaagattataacaattccaaatgttaatatcgcgcctaacatacagcttataatactaaacactgtcagcatttcttttttaatagaaaaattaagtgtaactcgccaattaattgtataataaattcctgacatttcaaaagcggttaaacctgtgagcactagcaaaatcacatctacattgcgaagctgtaaaagtgcgattaacaaaatgggaacaatatcatccaaggcagaaaaccaaaaacctgtttcagctactcccatcgctgtagacatactggaaataactgttacaaagattaggcagacgaatatccatatcggaagtttctcatttgggtaccacatactaaaagacaccaaatagatacagcataatcccaccaaaacaaatattccaaacagctttgatttcttatttgcctgctgtttcctgcatgggactgttagcttccatttttttactgctttcattattgcaacgatcccattcgtaagagaaaatgccaaaataacggaatatagatatgggttaagtaaatgttccgaaaaatcctctacaggatgcaaaaagaaaagtaatagagaataacaaaaaccaactagcatttttatccatgtctgatatcctatgaaatatcctgtggcaacatataacaagctattctgaatcaaaaaaatggaactatttcttagtcttatcatttgagatggtattaatttccatattttaacaaccaccgcatatcccgatgataaaattaccgataatatcattttctgccttttttcatggctgctctctgcagcagagatcattgaaattctcggtattaattgcggaaacgcatattgttcttctgaaaagtactccgtcattgtcgaaaaaaagagaattccaagtattgctgatataaccgcaatgaaaacaaattgaaaactctgctttgtacttaccttgcctccctgtaaaaatagcactgcaaaatacaatgcaatagtagatgcacaagagagaaatgctctagcaaagcaatctgctaaagcagttgttttttttgacaacgcatggaaaacttttaacaaacaaattgatattaaagcagtgtcgatcactgctccaacccctgtcttaaaagtactgataatagtagataccagtacgagacacagagttaaaaaaccagtgaagaaactctttatcacttcacttctactcaatagcaacacctctgtttctataattttaaaggttatctatgtatcttctacaatataatgatctgggttttaagaagatgaactcattgtatctccctattctagaataaaaaatgactttattggtcatataaaatttaaccgactacgtcattgccaacttagcaaattcattttacaataactttcagaaaagaaagaaggataaagaatatgagaaaaaaaataattttaggatgctgcatggcaattctttcaatgaactgcccaaaagatttttatagttttcaaggttacacgactgataatccccgcattatttgttgtaatacaaacaatgatagaggtgaaattgataatggagaagataatatatcaactccattctgcgatcttcctcctggtgattaaattattttattcttttcaaaatatttttcgatatactctaaattttctttacgttctggatacaatttgcaaagcttatgcgcttcccatacatagagaagcccaatttttcttaatctaagggactcttctccagaaagttccttagatttttctatataattccatccaatattgtaaataaaattataaagataatttcccttttcccatttcaaaagccaggaaattccttttctgcacatttcaatactctcatcatactgccgatgcaggccaagaatattggcataatttaacattaaaagataataaggcttataaccatccatacaagacaccttctccgtctgttgaatgacactagaaaatattctacaagctgttttatagtctccagcctctccatatgcatttgcaatgttatttaaaattagcaactcattttctgtataaaaatatttattgacgaattttttactatcataatctttaaaactttcttttaacagattctctaatgataaaatataatgatccaatgacacttttccacatctttgttctactacaagacgtatccgataaagaaattgtctgttttcaacatacatcaatggcaactgatttttgctaataatttcttttacttcattttctgccccttgataatcccctttttcaaatagccataataaccgattcctgacttttgcgatattggcatcttctgtctgtaaattgaaaagaattgtttcttctgacataccaagtttattcattattttttgaaagttctcttctgatggactcacaccaccactttcatatcttgctaatgtataagtatcgcatattccctccgccagttcttcctgtgtcatatttttttgtttccgataataacgtattacagatcccctattgtattctgacattttcttcctccatataagcaagcatttccttttcatttgtacattttaacaacttcagtgccataatcttatctttataatccttctttgactctattgttaaaaaattcattttttcttccaacgccatctttaactccaatacttctttcatagatctgaccaaatagtgttttttcatccctgcatatattttttgaatgaaatcatatgcagttccataattatagttctgatactcctgttctgctatcttatataaaacaccataataaaactgttccagttctaaagaaatataggaatgactctcaaggtattcttgaagttttgaatatatcttctgtgcatcctgcgttcttttgacttcctgatagcagtctcctaattctctcaagaccttaagctccataaaggataacagctcttgcccaccttgcttatattccttttgaatagcagtttttgatatagatttctcaaaacagtctattgcctgcatatattcccctatatatttttttaccaatccagaatagtaaaaaacatattgttcatgaattggctttgagatagatgccatttttttatagttttttatttcagcttctgcctccaaatatttcttctgttctatgcactcttctattttcctctgttgcttcatttcataatattcttcattgctgataatcatctcatattgctttgaatcacagcctaacctttgcaacagatattcaagcaaaaacttatctggtactcttaatccattctcatatctagacaacgcagtaacactgcaaagacctctacaaaccatagatttggaatatcttttttcttttctttggttttccagcaattcacctatggaaatttcatacattcataatctccccttctattttacttttttgattaatcctgaattgtagtataacagtttttttgttttttttctatctcaccctgtattttcacctctgagcctttcgttatatgagagggtaaatttttcaagagcaagatccacccgggtaataccgtatcctcattttatgagaacggtcttatctcctggtcaggtatcttgatggggattacgtttccccataccctcgctttggcatcaaagatgcagtcagtatccacaaaaacagatactgcactaattctttatcggaagggacagccgatacaaattagtgaactgtaacaatattcgatgtcacagtttagaggaaggaggagtatgccaccaaaagaaaaatcaaaggaattgaagcatcgaaacataatctgtctgaaacttacagacattgaattggaaatattaaatcaggctgcaagctctgtgggaatctctcgttcagaatatctacgaagattgttcctaaataaaccaattcaaattaattatgaagttgttgctgacatcaaactacttcgggagttggtcgggcaatacggcaaaatcggttccaatctgaaccagatcgccaagtattttaataccggtggaactcattcccaggctatggaaaatgaaatccatcaatgtatctccgacctcttcctcttacgaaaaaaagtgttagaaatggcaggtgattttcatggcgatactaaagcacatcaaaagtagaaatgccaactattcaaatgccattgattatctgcttttccaacatgatgagagcactggaaaaaagataaaagatgaaatggggagaagtcttttaagagatgaattctacatgaatggtctcaactgtgatccgatgtcttttgacaaggagtgtagtctgacaaatgcaaaatttcataaaaacaaaaaatcatctgaaatcaaaagtcaccattatatcatcagttttgatccggatgataaatcagaatacggactgactggggaaaaggcgcaggaattatgtttaaaccttgcccaaaaaatatttcccggatatcaagctcttatcgtgacacataccgatggtcacaatggttccggcaatatccatacgcatattgtgatcaacagcgtccgtaaggaagctgtcagaaggcagcgttacatggataagccccatgaagaaattgccggatacaaacaccgatccacaaataaattcctgaattatttcaaaaaggaaattatggatatgtgcatccaggagggacttcatcaggttgatcttctctctccggctgaaacaaaaatcacacaggctgaatatatggcgcaaaaatccgggcagaaaaaattagaagagacaaacaaaaaaatcattgcagatgggttgaaaccaactgccactacatttcagacacagaagcaagaactccgaaacgccatcaaagaatgcagctcgcattctaaaagctttcaggaatttcaatctctgctttttgaaaaatatcagatttccgttattgaagaaagaggaagatatcgttatctccatccggatcgagacaaacggattacagaaaaggctttgggaactcaatacggcaaagaacatttagaacagctcttcttacgaaaagatccgataaccattctttatgtcagatcgcatttacggctggtggtggatctccagaaaaatgtgaaagcaatgcaaagtcccggatatgctcaccgggtaaaaatatccaatcttcaggaaatggcaaataccattatctatgtgcaagaacatggatacaatacccaaatcgaattaaaaaatgccttttccgaatctcaaaaacagttagatcaggcaacagatcagctaatgaaaatgaatgcagatttgaaaaacatcaaccgtcagatccattacaccggacaatattttgcacagaaagcaatctataccgaatttttaaaggcaaaaaacaaaggcagattccgaaaggaacacaccgctgaaattcaggcatatgaagaagcccgtgactggctgaaatctttttatcccgatgggaagatgcttcctatcaaaacattgaaggaacgaaaagccagcttgcaggaacagatcgaccagcaaaattcatccatccgatctctaaaggatctgacacaagatttaagaaccgtagacaaaaatgtggaagcaattctccacaaccaggttccgaaaaagcaaaagacacaggaacctgaattataaatcattttacgaaggaggaattacaatatgacacaaaatgaatttaatgttgtccttgaacaacaatatcgaaaatgtgccgatgtcctggcacataagaagaaagaatacacaggagaccgcattgaccgcctgagtgcatttaaaatcgctgcctcattacagggatgcacacctaaggctgctctggccggaatgatgtcgaaacatgtcgtatctctctatgacatgtgttactcttctcttctccagtttgacttagaacaatgggatgagaagattacagactgcatcaactatctcattctgctgaaagcattgataaaggaggaacaagcctatggatcacattgagacaaaaattttaaatagttataccattcaagaagcagctcagaacatggtattcgcagcaaggcttacccaacagggacattccattcaaaacatggatgatcttatggctctttatcagaaatcttttacggataaaactgtagatcggattgcccgtctgcctcatccaacggtacagaaatttacggtgatcaccgttgcgattgtaggggcaagcagacgttttcttgcacagatcactcgtcatcaaaacgaagtgaaattcatgagtgcatctctgcaatatagcaactattcagaaaaagctgcatttgcgatcccatatgaaatccttttttccgaacagagatacattgatctctatctgcaaagctgtttatcggatctcagatgctatcaggaattgtgttctgtgggatttcatcatgattctgccggatatgctctccctcatgctttaaggaatattctgatcatctgcgctacaccttatgaatggaaacatatgatcagtcagcgtatctgcaggagaaataccgacgaaacaagaattgtgatgttggatatctggaagaaattatatgaatttgatgccatagatacttttccatttggacaatgacaataaatactttttccttccgcacttgcttcagctaccttaactgatagtggaatgacattttcaaagatagaaatcttagaaccataagtttctctcactctggaagcaatatctttggcgtaattagtacgaaaatccaccattgtcaaaagtattccctgtatcgtcagcttccggttcaatctcttctttaccatagaaatagtcctgatcaactgttgaagtcctttaaccggcagatatgcagcttgtacaggtatcagaaccgtatcagaagctactaaagcattgatggtcatcatgcctaaactcggcatacaatcaatcaaaatataatcgtatcgtgatcgcatcgtatcaatatattccttcatgatcagttccctactcattacattactcatggttacttccagagcagataactcaatattggccggtaggagatccacttgttcctcatgatgtaaaatgccttcttcctcagcaatttcctcgtcattgataatattcatcataatagttgcaagagttgttccaatatcatccggttctacatatccaaggcttgcagttaagcttccctgtggatccgcatcgattaacaatactttctttccatttctcgctaatcctactccaagatttaaggttgttgtactttttgcaactccacctttctggtttgctactgaaatgactttgcacatactgttttcctccatttatttctcccaattttcattctgccagattttcaataatgctataatttctcgtttcatcatggcaggtgtgtatctgcttggaaaatatttgtgaagctgctcatttgtaaaagcaactctcgtgatctcacctttttttatctcactcataatttcctgcatcttctctaatgtaagttggttttctttacttaactttttaatcctttgtgcctgtgataaagatggaacagcctgagcataatccatagcttccaacaattgtttttgctcttcttccttcaacgctgaaatttcaactgccggattaaaagatatcaattcatcatccaatttctgtaagaactccggtattagtttcgttaatgaaatataccgttgtacctgcttcggactatcaccacattcttcactgataatctccactgttctcttttttatcgttttgtggtctatttggccttttttcctgcctgattttcttttcagtacatcatttttcattttgtaagcaaaagccttttcactaaaactgattttttctctgtgcagattggaatctaccatattcaaaatagcttcatcttcattcattacacgaattattaccggtacttttcgataccccagtaactcagcagcatgtcttctcctatgtcccgctataatctcgtaaactccatccggtacaggtctgacaatcaacggagcgagaattccgtacttctcaatactttcttttaataaatgcatctcattatcatctttcacttgaaaaggatgatttttaaaagaacggagtctttcaatctcaatttcaatgatcttctcatcttcattcttctggataaattctttcgttacttccgtcatcatttcctccttcttcggtcagactaaaaaatgctcgtctggatccgattatttttgaaatcagttccaaacgagcatctcgttttctattagctacagctaatatatttctctattgtttcagctaatatatgtttgcaaattatattctgcaaagaatttttcctttgatctactgtattttacattcctaaatcaatggtgacaacagatacttccccaaatgttagcaatatctctgatacagtctgtttgcaaaactctattttttattagctgccagctaacaattatttcattgtattagctgaaaatcatcctcaaagcaataaaatcatgcatttttcttatcaaaaaagcgccccattatttgcatttctgctaataattgaacgcttttgactggccgtctcgtataggaatcgaacctataatttagtcttaggaggaccatgttatatccatttaactaacgagacaaaatgccattttcccttgaaaacacgcggttttccggctttttggtaatggcaacctttatttaattatcagcttttttcaagctgttaattactattatttttcatgttggtgacatcaaagcactcacctattagggtaacaccttcgtgtcaatttttactcttcttaactagatttgaacccaaaagttttttcaggaagtgataaccttggttcctccttaggaggcacttgttatatccatttaactaaggaaacatgcatctgctttgccgaaacaaagcaatatgttttttcacactgttattagtataccaaataatctctgattttgaaatacctattttgaaacttttgaaactttttatctgcttgtcttctcatttactggaaattaattatcccctgcagccatatattcgctttaaatctccgccctacttccggcactccgaaaatactatttctcggtacgcaaacgtcaaactgcagttcattgacatccatcgtaaatacataaagttctgtgccggttctctcatttctacaggaacgaatctttaaaatttctcccaaaatagaatactggtcacattccgcaccatatggcataaaatatgtatctacaattgtatagacatcatttgtcatcaactttttggaaactttggagtaagtgtccatatcctctaacgtcaatgtctccatcgccttctcgtcaccactttttgccgcactcaaaagcatcatacggtttcttgcctcttcctgttggctctgaagctggtaatcatttttcttaatcggcagtaaaatacttcctgaaagtgccatagccgaaagtgtcagagaagtagattttttagaaactcctcccgagtttttcacttgacggtactccatcccattgatcagatgaaatatcagactgattccaacccgcacatcctcacacacacccaggtacatgtctctgtccattctcttttccacaatgatatcttcataagaagtaataccacttccctttaaataagggaagtagtattccatctcaaattcttcgccatcgtagtccccgcacataatgattcccatagcttcagaatattctttcttatattcacaaactatttctccttctatatttgcagtttcttcgtgacttgtaaagttttcctttgtatctctcagaacttctttcagatcttttttcgttttcagatggtcaaatccgattgcttttaaatattgatgcacgtttttttcctctatttgatttctgtcttaccacccatatacggttgtaatgcagctggaatcttaatagaaccgtctgcttgaaggttgttctccagaaaagcaatcagcattctaggtggtgcaactactgtgttatttagtgtatgagcgaaatattttccgtcctcacctttgactctgatattcaatcttctcgcctgagcgtctcccagatttgagcagcttccaacttcaaaatatttctgttgtcttggtgaccatgcctctacatcgacagattttactttaagatcagcaagatctcctgaacaacattcaagagtacgaaccggaatatcaagagagcggaacagatctactgtatttttccacatcacatcgtaccatttcatgctgtcttctggcttacatacaacgatcatttcttgtttttcaaactggtgaatacggtacactcctctttcctcaattccatgagctcctttttctttccggaagcatggagaataagatgttaacgttcttggcaatgtcttctcatcgagcatggtatcgatgaattttccgatcatagagtgttcacttgtaccgatcagatataagtcttctccttcaatcttgtacatcatagaatccatctccgcaaagctcatcactcctgtcactacattactgcgaatcatgaatggcgggatgcaataagtaaatccgcggtcaatcataaaatcacgcgcataagaaatcactgcagaatgtaatcgtgcaatatctcccatcagataataaaatccgtttcctgctacctttcctgcactttccagatcaattccgtcaaatttttccataatttctgtgtgatacggaatctcataatctggcacgaccggctctccatatctctctaattccacattttcactgtcatcttttccgattggaacagatggatcaatgatatttggaattgtcatcataatcgtcttaatcttctcttctacttctttttcttccacagaaagtttttcaatggtatctccctgagcagacacctgtctcttatactcttctgcctcttcttttttcccctgagccatgcatgctccgatcattttggaaattttatttttctctgcacgaagcgcttctacttcctgtttgatctctctgtttcttaaatccagtgcgatcacttcatccacaagcggaagcttactgtcctgaaatttatttttaatattctgttttacaatatctgggtttgctcttaaaaatttaatatctaacatttgtttttctcctcataccttctatttttttacatctacaatatctttgagtgcatatgcttcctggaaaattgctttctctaatgattctgtttcctccgatgacagttctacataactttcacccttcacaatctccttaatatagttatagcacccttcccggctatgcattacatttaacacaaagccattatcatttgcatcaagcaatgtcaacacaaaactgagatttcctcccatttcctgaaatgcgtcatacttgacaattccaatcttctgataatttccttctagcctccgataaatttcttttatattctgccggtttaactttgccatatgggataaattatcaatttcatccagtcggtctgtaatgctcttttccattgaccttccatctttgcctttcataaatgcattgtaactgctttttaagcgattatatttcatatgcatacttatgacaagcacaaataagattataatgaaaatcaggagtccaagcaaaaggaacaccggatcaaacccgagatgaaatagtaaactgtcttccatatttcctcctttttttcaaatggttcgtgtacaaattttactgatggatagacatgatcatttcaaatatatgttccaactcttcgtcagaatagtattcgatttctattttcccttttccttttgatttctgattgacactgactttggttccaatcaccgatctcattttctcttccagatcccgataaataaagtcattgctggtatcctttttcgttttttcctttttcggtttctttaaatcttttacaagtttttctgtctcacgcacgcttagcttttcatcaaaaattttattagcaagaatatattgctgctctttgtcttcaattgcaagaagcgctcttgcatgtcctgtagaaatcatatcatcgatgatcatctgctgcactttttcatcaagcttcagaagacgcatggagttggtaactgctgttctactcttagaaaccctctctgccacttcgtcctgttttaattgaaactcttccaacagccgcttgaatgcctgagcttcctcaatcggattaagattttctctctgaatattttcgattaaggcaatctctaccatttcttgatgagaatattctctgatgattacgggaatttctttcagacctgccatttttgcagcgcgccatcttctttctccggcaataatctcataataatctccttttttctgaacaagaagtggttgaagtacaccgaattgccggatggaatctgctaattcaatcagggaatcttcatcaaaattttttcttggctgtgtacgatttggctctacttttgttatttttactttttgttctcccgatgcaggcattgttgttttttcttttccagaagcctgttcgctcaccttatctttgctcgtattcgcctttggtttatgatccggaatcagactgtccagcccttttccaagaccgcctctttttactgccattactcttctcctttatgaatcacttcttctgccagaagcatataactttcggctcccgatgattttgggtcataaatattaattggcaatccatgactcggagcttctgccagtctgatatttctcggtataattgtcttataaattgtctgatccaaattatcctttacattttctactacctgaagcgacagatttgttctggcattatacattgtgaatacaacaccttccatctctaaatctggattcaatctttcttttaccagatcaatcgtgtgcataagctggctcaaaccttccaatgcataatactcacactgaatcggaactaaaacagtatccgccgttgtcattgcattaatcgtcaacatactcagtgacggaggacaatctacaattacaaagtcatagtttcctctgatttttgccacttcatcacggatgataaactctttgttttctacaccaattaattcaatttctgcggcggacagatcaatatttgtaggaagcaaatcaagattctcaaaaacctctttgcacaggcactcttcgacagtcgcccgtccaatgatcaaatcatataccgttttttctacattatctttatcaactcccaatccactggtcatattcccctgtggatccatatctatcgctaatactcttttacccaacgcgctcaagcatgaggataagttaatagctgtggtcgtttttcctacgccgcccttctgattggcaactgctattattcttcccatattagtgtcccctttctcttgcttttttattataacactaaaaagaagtttaatctacacaatgtttcacgtgaaacatttattttatttctcttctaatgtttcacgtgaaacattttatttccatcaatcattttactatgttatttacaaatgttgggtaaacagtttatctacttatttattttcccttattattcttttttatagtgaatgtttcacgtgaaacatttcattagtgagtttactcttgaataaagttttatcttttcttgctttcctttgtgtagtataataataagaaaaagtacaattacaatgtactgtcttatcacttatttaccatgatacaaagtcacttacagtggcattgctacgaaaggagttcttctatgagttggaaaaagaaacttacaacgggagctgttctggcatcattgacagctggaacaatttatacaatcaataaaattatttcttttacatctacacttgataacttactttgtaaagaggacggtcactatttcgattggagatttggaaaaatattttatagaaaacaaggagaaggaaaacctatccttctgattcatgatttgactgtaaatagctcttcccatgagtggaataaattagtaaagtctttaaaaaaacgaaacacagtttatactatcgacttattaggatgtggacattcagagaaacctaatctcacctacacaaactttctttatgtccaactacttacggactttatcaaaactattattggcgaaaagaccgatgtgattgccaccggaacttcttcttcctttgtattaatggcatgtgcaaatgacgacagcctttttgaccggattatgatgattaatccgacgaatctgtctacacttgcgacaatcccaaccaaacgaacaaaacttttgcgctacttacttttgactcctcttattggaacattcctatataatattttgatgagtaaacgactgtcagatcaaaacttttttgaagagaactttcataacccagaagcccttgatgtagaaatcaaaaactcctactatgaatcatctcacttagatagttcccatggaaaatatctacttggaagtatccttggacgttatacgaatgctaatatgtttcatgctctaaaaaacatcaataatagtatctttctcattgcctcaacaggttctggagaaaatattgcaattgcagagcaataccgaaattatattccatctattgaaattacaacattgaaggacagtgtacattttcctcagcttgaaacaccacagacacttcttgagcagattgacttgttcctaggtgtggaagaagagtcttaataagctttagaaaatagaatgtaacgtgaagtgtactttttactctataggattccataggaattttctttaaaagacaaagaaggacgaatcaagaaatttttatttctcattccgtccttcttttgtatttttaagctgtctagcaaatccccaacggttcctttgccggaagtccggcttttctcggatatctttttgcagttggttttactttttcaatttttacgaacgatcttccaatctcacttcccggaagctgaaattttatcacttctctgagagttcctccaagaatcgtaactgctttctttgcctgcacaacttcctcgtcaatttctcccgatttatatggaaggaacaccccaccttttttcacatatggaaggcaatattctgacaatgttgccagatttgccactgctctagacacacagagatcaaactgttctctgtattcctgctgctttgcgtaatcttctgctctcccatgaatagcccgaatccctttcaactgcaatttttcgatgactgcgttgaggaattttactctcttattcaaggaatctaacaacacaacctccagctccggaaacactattttcaatgggatccctggaaatccagcccctgtcccaacatcaattacactttttacagacttcatgtccatcgcttttacgatagaaacagaatctacaaaatgtttttcatttacttcctcgtattctgtgattccggtcaggttcataaactcattccactcaacaagaatctcataaaacagatcaaactgttctttttgtctatcatccaatacgattcctaatgcacttaacttctcttcaaatttatgactgctcatctttttccctcttacttccataactttccatatatacaagcaatacagagatatctgccggtgaaactcccgaaattctagatgcctgtccaattgaaatcgggcgatattgattcagcttctgctttgcctcgatacggagacttccgatttcatcgtaattgatcgcatccggaatccgttttgtctctaattttttgaactgctctacctgcttcatctggcgccggatataaccatcatacttaatccgaatattaatctgttctactacttcttcgctcaactccgttcttcccggatcgatcgcttccagtgcttcataagataattccggacggcggattaactctgccagtgtaattccattttttagcggagtgcttccatattgctccaatacttcctgcactggtctggatgcacctacatttgtatgttccagccgttctacctgctcttcaatctgccgctctttcttcttcagatttttgtagcgctcctcatcaatcaacccaacttgatatcctatctccgtcagacgctgatctgcattatcctgtctaagaagcagacgatactctgccctggatgtcatcatccgatatggttcatgactttcttttgtcacaagatcatcgatcagaacaccgatatatccctgcgaacggtctataatgatctgctcttttccaagtactttccttgctgcattaatacccgccacaagcccttgtgctgctgcctcctcatatccagaacttccgttaaattgtcctccgctgaacaacccgctgatctttttaaattccaacgtcgcataaagctgtctggcatcaatacaatcatattcgatcgcataggcattacggacaatctttgcatgctccagccccggtacacttcgatacatttcatactgaacatcctccggaagcgaactggacattcctccgatatacatctcattagtgtcaagcccttccggctcaataaatacctgatggcgatctttgtctgcaaatttcacaaccttatcctcaatggaaggacaatatcttggaccagttccctcaatcattcctgagaatagtggagaacggtccagattctcccggatgatctcatgcgtcctttcatttgtataagtcaaccagcatgacacctgatcaatctgtacttcctccgggtttgtcgtaaaggaaaaaggaactactctctcatctccaaactgctcttccatctttgtaaagtcaatagaattacggtcaatccgcgctggtgtccctgtcttaaaacgatacatctgaactcccagttctttgagacaatcacttaaataatttgccgccttcagaccattcggtccacaattttcactgacttctccataaatacatctggacttcaaatatgttccagtgcatagtactaccgcatcacagtgataaactgctccagaaaaagttttaactcctgtcacttttccattttccacaagaatttccgtaacttccgcctgcttgatgtccaggttctcctgctgctccagcacctttctcatctctgtactatatctcgccttatctgcttgtgcacgcaaggaatgaacggccggtcctttggacttattcagcatcttggactgaataaaggtacggtcgattacctttcccatctctcctccaagtgcatccacctctttgacaaggtgacctttcgaacttcctccaatgtttggattacatggcatcaacgcaatactatctacactcacagtaaacatgatcgttctgacaccaagccttgcagctgccagagctgcttcacatcctgcatgtcccgcaccgatcacggcgattccatatctgtctttattttcccatacagaacttgctgaatatttcatttaccaaatcttctcctatcgtttctccggtgatacttccaagcgcctcataggcatccataaggtcgatggaatagaaatcctccggcatgttattttcaatacttccaattactttttccaaactgtcataagcattctgaagggctgttttctgtcgaatatttgtaatatatacttcgtcattgaaagaaacctttccctcaaaaaacatctctttcagtgcatgctctactttctcaatcccatgctcctgttttgccgatatttcaatcatcggtttttctgtatatttttgcaggagctcctttgtgataacagtatccagatccgatttgttcaaaagaatcaatgcctgcttctcccggatcatctcaagaatctgttcatcattttcatccagtgcacgcgatgcatcgacgacataaatgatcaagtctgcatcttttgcataatctttcgccttatccaccccgatcttttcgacaatatcttctgtatcacggatccctgctgtatctatgatatttaaactgatcccattaatctgaatattttcctcaagaatatccctcgttgttccttcaatatccgtcacgatcgcccgttcttttcctgcaagcacatttaacagcgaagactttcctgcatttggctttcctacaataacagtctggattccttccttgattattctaccattatctgcactctctaacaacctgcgaattgctccctgaagcttttctacggttccctgaagcttttccccatatccgtcaatgctaatatgttctggatcatccagcgctgtctcaataaaggctgtgtgatataaaatctccttacggatctcagatattttttctaatacagacccctttaactgacttacagaactcttcaaagcatattcatttttagactgtatgacatcgatcaccgcttctgcctgtgacagatctaatcttccatttaaaaatgcccgcttcgtaaactctcccggctctgccggtcttgcgccatacttgatcacagtctcaagaatacgcttcattacgtacactccgccgtgacagtcaatctcaacagtatcctctccggtataactatgcggccctctcataagaagcaccaaaacttcgtcgatcgtctcttctccatccataatgtatccataatgaatcgtgtggcttttctcatttgagagctttttttcttttttcttccctttgtatatacggtcaacgattacaaaagcttcttccccactgattcggataatcccaattccagaagctgtcattgccgttgcgatcgctgcaattgtatcctttatcatattttcctgtctctcctttctgctgtctatgcatcttccaaaacagtttctaaaaaaggcagcattaaaataatgctgcctgaatttctttgttattgtcttctggacggtgtaattacaactcttctgtatggctcttctccttcgctgtgagttgacacatacttgtctgactgtaatacagaatgaatgattcttctttcatacggattcatcggttccaaagaaaccggctttcttgtacgttttactttatgtgcaatattttttgcaaggttctccagtgtcgcctttcttcttgcacgataattttctgtatccagctttacacgaatatagccatcctgtgttttgtttgccacacggtttgtcaaatactgaagggaatctaatgtctgacctcttttaccgatcagaatacccatatgttctccttccaattcaatgcagagagttccttcactgtctacttcggaataaatcttgacttccatatccattgtcttcaagacatcctgcaaaaacttctccgattcacgaattgtttcttccgttaccttcacagaagaacgctcctctttttctactgtctttgcttctagtgcaggacgttctgccttctttgctggaaccgacggacgcttctcttctctttttggctctggtttcactttcggtttgtcgaatttaatctcctccagctctaccggcgcttctgctgtctttttccttctagctgagatcacagcttgctttgccccaattccaagaaatccggaacttcctttttcgattacatcatattctaactgatcgctcgtcacccctaactgaatcagcgcttctgtgatcgcatcgctcagtgtctttgcggatactctaatctcttccattcttcttccctcccgtttctgctatagaaatgcggtttgaattaatcgttttcgttaaatttccttaccatatttgcttttgctgtaaggcttcccggttttgcatttttaccacgctcagctgcctgctgcaattttgcttcctgctcactgtctgctgtatgattatgcttttgctctaccgcgatattgcggacttttttcgttgccatctggttcagctcttctgtggaaactttctttttctcatacttcttctttgctttttccatatttctctttacgagctcatccatatccatacggtcaagatacttattgatcgctacttgctgtaccgaacggcaaatcgcactaaagatccagtacaaaccgagacctgccggcattgtgaaacacataaatactgagaataacggcatgatcatattcattgtcttcatagaatttgccattggattctcccgatcgtccattccaggtgactgtggcatcaacttaatattgatccactgtgtcaaaccagataagatcggaatcaaaagtgcaacaattgcaacaagaattgcaccggtctttaaagcatccatcatcaggttcacaggtgcatctgaaatatttgctcccaagaagttattaatatgtgaaatctgcccggatgttgaatcaatcaaggatgaaaggtccgggaatttatcttttaatgtatcccatgtacttggctggaatttataaagtacatctacgatcgtatttgtctttgtatagtcaaacttttcaggattgatcatgatcgggcttgccgaaccaatcttctccataatcttctgataaccgccagttgccataatctcattgacaagaggcatatacatatcctttactccgcctacatatgccggaatgttttgaataaccttccacaatgcaagtaagatcggaaactgaatcactaactgaagacatccacccatctgtgaagttccgtacttatcgtacaccatcttcatttcttcctgcattttcagcatggattcctgatcccgtttgttcttgtactttttctgaattgcctgaagttcagggttcattactgcacttaattttgaaaatttctgctgtttgattgtaagcggaatcataaatgtatagataataattgtaaataaaataatacataaacctatgttttcgattccgaatgcactactcagcacattaaagataccatccattaatttaccgagcagccacgccacctgtcctataattggcgtcgtcgattgtgtcaaaagaatacctgtcattttttcctcctttaaggcacagggtcatacccgccttttgcaaatggattacaacgtaaaattctccatatagttaataacccaccctttaatgccccatatttctcaatcgcttcaattccatattgagaacatgtaggaaaataaatgcagtgagttgttctttttaacccggataaatatttctggtaaaacctgataagtgcaataaatatctttttcaccgattttacatctccattttgttacttatatatattatgaagtcttcccaggtggatcaatgcgctttccatctctctgtacgagcgcccattggcactcactctcgcaatcactacaatatcatatccactctgaaaatgttcttcttgtaatcgataactctctctgatcaatcgtgtcagccggtgtctcacgacactgttgccaacttttttgctgacagaaataccaagccggttccctccggattggttttctcttacatacattaccagatacttatttgcataagactttccagtcttataaacaatctgaaaatcttgatttttctttaatgactcggaaaatttcattattatcttctcctgatttttaaagaagaaaaggccacatatatgcggcctacgctgataactgttttcttccttttgctcttctggcagctaaaacttttcttccaccagctgtgctcattcttgctctgaatccatgaactttcgctctagatctcttttttggttggaatgtcattttcattgaaatccacctccttagacatgaaacctatatatataaatatagacatattattttttagacatcgtattttattataagcataaaatgccatttcgtcaagataatcctttcattttcttgatttttttccatttttccacatatatgatatctccttatttttatctgcttttctactttttccattctcctgtttctcctctttttccaactcttttttccatttttccccgttttttctataaataaaagatgctctgacacttttccacacatcatctagtattttttcccgaaaaaatcatgtggatatcccacaatatagtgtttgaccaaaatgttatccacaagttgtggataacttgtggataactataaggataacctgtggattcaatgtttatagacgatttatccacccgtaaaatccttattttgggggattttccactgtctataaagttatccacacttatttccattgcttaaatatgggttttgatgtaaaatatagtggagagattgtctacaaatttcttttactatgatacttaggagttagaaga

SEQ ID NO: 37 - DNA, 6164 bp, Faecalimonas umbilicata
  source 1..6164: mol_type = genomic DNA
gcattagattttttgatcgaagttgaagcaaatggcatggataaaaccgcggaaaaatatggagtaagtaaaaggacagtatatagatatattaagatggctaaagatgaattagattggaacaattaggacatatattaataaatgacaatgacataaattgaaatatgtcgcagatatggctatataaaattacaatttcaacatatgtggatatttatatgcttatttgaacgtatatagatcaaatttcaattttattttttagtgtagtttattaccatataaagtaaaaagtgtcttaaaaacgattatacgcgatttttggagagtaaaatgagtaaaacaataaagcagatagcagacgaattaggagttgagaaacaaaaagtatatcggtttatacaaaaaaatcacatcaaagaagtacatcatgaaacacatcaaaaaaacggtgtgaagtactatgatgatgtagctgaaatgatgataaaacaagggtttttggaagaaagtacatcagatggagtacatcatgaagcacttcaaaatcacatcaaaagcacatcaaatgaagtggtttttgaaacacttttgaagcagattgatgtacttcatgaacagataaaaaatagggatgaagaaatcaaagtcaaaaatcaacagatagaacagttacataagcttttggatcaggagcagcagttgaggatgattcaggaacagaaaatattacagattgaggagtcaaattcggaacaaaaagaaataaaaaagaagtggtggcagttttggtaaaaggcttttaggtattttgaattgtcataaattaatatataacacaaaattataaaagtaaaaagataatttatttttaataataaggaaacagttttttaatagaggtcaattacgatctctatttttttatgcaaaaaatcagaaaacaatttttcatctttttcaaaaatgagaagcgaattaaattatgtagctaaaaataattttttatttgaaattcaggaggaagaaagatgaaaacagaaaaactagaaaattacaaattagttggtagtatacacacactatcaataaaaacggacagaattattgaagagatacaaccggagttagcgagatgtatcaaaagtagcacacagacaagaaatgatataactacgacaacaagtattattaatccaaacaaattagttggtgatatatatgcttacagtgattttaaaactgcattagatacgattttggtgggatccggaatttttgactacaaaattgtacgtgcagatatgcggcttgatagtacagatagcgagcattacaggcagtatgcaaagttaaatagatatttgatttctgctttggcggttacatataaggtaaaaaatgtttataaaactgagaatttatttactcaaaagcaactgagtgtagcaatcaaaaacgattacttcgaggtagaaaattatgataaggaagccgagagtagaggtttagatatagcagcgagtagattagagcaacgaagcaaaagatggagagacaatgatttaaagagagaatttgtaaatggttggtcgtatcgttgggataaagctattaataatcttgatcttgtacataagacatataatgatgcgttggaaaaattatacaaagagaataaaaatgtaaagccaattagataccgtagtttgacagactttataattcaacatcaggattgtattttttgcaacgcacaaatgattgacttattatcacgatttccggaggaggtgagaacaccgaaaaacagagcaaaacatcataaagcaaaatatggaattgagtattttagcaaaagtgacgtaaaaaaggcggtgaaagagatcaaaagagcaacaaaagagttttataaaaagtagtcaaaatggacacctaaaaagataccaagggtgtccaaaaaagcagtaaaaaaatagaatataaaacatcatgaaagcctataaataaaaggttttttggatgtgtagcaggaaaatgcaatgtcacaatatgcacgacatttatgccggtatttatgccggtgtatgtcggaactatggtgataaatatttacaatttagaaggagagtaatattaacatgaaaacagaaaaacttacaaaagaacagtatcaggaaaaatttacaagactattagaagaaactaattatcagttacaagacggagaagagtttatacaatgtaaggatccatatccggcatattggtttgtatcaaataaaggatatttactatctgtatacggtaaaactatcaaacatgtaaaagcgcgttataggacaactggtaaaacttccggtaactggttttatacttatgttaataaaagcggcaaaagaaaaaatgtaacagtacatacactttttgcagaacattttttagggtatgaacgtaacaaaggtttagaggtacatcacatcaaaaagagtaaatcatttttgcgagatgaatttgaactagaaaaatgtaacagtatagataatttacaagtgttaccaaaagatatacaccaaaaagcaacaaagattggcagccatactcaagagcagctttcgaaaaaaagaaataaaaatgcgattgatataattgtatcagaggatgcatttatgaggttgtttgctgaagcatttatcgaaaacgcaaaacagggaaacacaacgatgtatattagtaacaatccagataatttgatagataagactgttgatgtaaagagagttgcaaaaattgaaccgttggaagaataagtaaaataaggtgttgaggaaaaagatataccttgatagtcgagatctcgaccgtataaaaatgaagtaacaattggctaccgttttggtagttgggaattcccaattttttaaaatataattcatcacttcatcaaacaactttaatactttaccgaactaaactaaacaactaacagaatgcctattagcctatatttacaaggtttttaggcatttattaatttatgctatgcagcaggattttagcaataaaccttgtaaataagggggtttatcgaactcaatgataaaagaaccttgtatttacaatagattctacaaaagtattgtagttagtgggttttatagaaaatatcgaatgtataatatatttcagatataaataagtaaaaataataaaagtgttgtatttataagtaattttgatgatttgagaaaaatgagcgaatacattaccgaagtgtcaaaataactataagcataaaatatttgaataaaaacatcaaaatacattgactaatagtttaaatgacagtaaaataaaaatatcaaataaactatagttaaaatgatggattgaaaggaatgttagaatatgagtaaagtagtagcttatatgaggatcagcacaaaagaagaaagaggaaaacagaagtttacgcggcaggaacaagctattgagagatggaagagagaaaatagaattgaaataacagaacgtaggatatataaagatgacgcaagtggtaaatcatttgatcgtaaagcatggaaagaacttgaaaacgatataaataccggagatactatagtatttaaagatttatgtagatttacgcgagaacgtgataacggatataaaaagtatgttgaattgttaaatagaggaattaatttaatatttattgataatcctacattaaacactgattatattaattcaatgcagaatacagcaaataggatgaaagaaaataatataattggtggtatgacacttgagtttgttataaaactacttttagtaacagaacttgacagagcggagcaagaaagaattataacaagtaaacgtatagcggatggaattaaggcaagtgataaaaaatctggtagaccagttggtaaaattgataagatgtccaaagaactagagtccgatattaaaaaattgataaatgatagaaatatcaaatacgtagatctgatgaggaaacacaatatttctcgtaatactttaaaaaaatacgaatccatagtaaaagagtcattggtataatccagtgactttttgtatattcgggggtatattacatttttaagatatgtacaaatttgtatatccttggcatggattgtattcacaccaaacagttaaaaataaatcttacgaacttgactacactatatacaaataatataatcgacttaggatagcggaacgaagttgtgtatatattacacccccgcaatttgtaaaagtagtaccaccatgtcacggatcactggtagggttggagatgtgatatggtgaagaaaattaaattatgtcacataaatatagggtaccttagtacctggatcgagtatacagactaaaataagtctgttatatttttacaaaaaaaggtggaaaaacctattgataaaataacgtccattatatgcatttgagggaggaatatgtatggattttaagcagaaatatttggaaaaatattttcaggaagtagcaccaaaagagttttatagagatatttttgtagagggtgaattgcagaaaaaaggagtttatggagataacaagtataatgctattgcggttgagttaggaaaggataagattaaaagatatactataacagatgatttggatatgatagatgagttgttgcacagtgaaaattttattatagtttccccaattacttacgttgggaaaagtagaaatagtgataatgcaagaatgatgtatgctttggctattgatttggatggtgtaaacaaagagataaatataattgatctttttcatcagatcgagaaggtggaacatttgccacgtccaacatatacggttatttcaggtggtggattgcatttatattacgtttttcagcgacctatacctttgtttaaaaatatcgtacagcaattgactaatctcaaaaacgatttaacacgcaaaatatggaacggttatgttacagatctaaatgataaagtgcaatatcaatcaatttttcagggattccggctggttggtggtgtgacaaagagtggagcgcggacaaaagcatataaaacgggagaaaaagttacaatagagtatttaaatgagtttgtttttgatttgaagaatcaagtaacacaatttatatataaaagcgatttaactctagaagaagccaaaagtaaatatccggaatggtatgagcgtcgaattattgagaagcaaccaagaggaacatggacttgtaaaaaagatctatatgagtggtggaaatgcagattaattgaaatacaagaggggcatagatattatggtgtgatgtgtcttgcgatatatgcgaaaaagtgtggtattctacaagaagaattggaaaatgatgcgtttagcatggtagatagattggatttattaacaagcgatgaggataatcattttacgagagaggacgtgcttgctgcattggaattgtataatgataactatatcacatttccgattgatacgatctcaaaattaactaagatacggattgaaaagaataagaggaatggattaaaacaaaaacagcatttgtatttagcgagaagaagaaaagaagatatgaaagctattgaattgcctatgaaagcaccagaaggcagaccaacagcgcaaaataaagttaatcaatggcagaaagaacatccaaacggtaaaaaagctgattgtattagagatactggactgagcaaaaaaacggtatataaatggtggacaagtaagtaatagtgtgctaatgttatgacataaattaatagataacaatgactttaattaaaaaacgacaaaaaggagattatgctatgaagaagatatataacttttttttggatccagtgggcaatcaaaattgtaaaacgcatgcaaaagaaattgaagaaattttgaagaaaataggtgtagttactcaaattaacatttcaaaaaacggatataaaacacttgttatagaggtagacgaggataggatcaagcaagttacggaacaaaatagcaggaatgccgggagaaaaaagaaagagttttcaactactgaaaaaaaagaaagagaaaaaaatgatattacggaggtaaca

SEQ ID NO: 38 - DNA, 3563 bp, Faecalimonas umbilicata
  source 1..3563: mol_type = genomic DNA
agagaatatgactatagagcccaaaaaatcattctggggcaaaatagagggattagagaggaaaggtgtatttgttgagaacatggacgaacaacaaatatacacccttatggggcgagttaagtttagtgacaaattgctagatgagtctacttatgctgaaaaatattgtgagatgataaagcgatctgcgaaaatggaagccgaaaagatacggtctgaagcaactgcggatcggaataaagttattgctaaagccgaaggaattctccgacaaaaagaagaaataatcgcaactgctgaaagatgggcgaaaagtttacaagcgaaatatgatgaattatcagagaaagtcatgtcattgttaaaaatggaacgacggttgcagggagaagtggcagaacttcaagataaacgaatggaattggagccgatcaagcaggaagtcgaggaaatgaaaaaagcaaaaagtattctttctggagaattaagttatgagtttacaagatctaaatttagaagctggcactctatgccgtttggatcgaactatgatatttaccgggaaaaaggcgaattattagcgctatataaagatggaatgatacgcaaagtaggctctaacaaacacggcggatttgatgataagacgctgcatgatgagaaaaatggtttgtgtattgttgggattatgcaggaagaagaaaaagttcaaataccaaaaaggttgttgaaagaattgttgcaaaaagcagataatgcgatcggattgtctgatgatttaaaaattttcattcggcaacaaaaggaagttgacaaagtggcaaataagaaaatacctagattgcttcgatagcgagaatgcagtcaagcgaatgagggagcataaggaacgaccgcagggagaggtagcggactgaatgaccttgacggaatgaagcgtttacactgtacagcggagctgttgccctcggagagagcgacggctcctgccacacggcgagtgtgggtaagccggaacggctagggcaaagccctattgagtggatttccgaaatgagatgagtgggggggggtaactacgacacccccccactgtgttcgttgttcactaagaaatgggattaaaaaggtattaaaaactgtggttaagggattctcagcaaaaaataatgggattaaaaaggtgcataaaataaaaaaaataatgggattaaaaaggtgcataaaataaaattcaaaaatttttgattgaaaataatgggattaaaaaggtgtataaagagtatataaaatagtaaaaaaaataaattgacatttgcaaaacaaaggggtattatcggtgcataaaaggtattaaaaagaaaggatgattttatgatagctagtaagaaaaaagggagaccatcaaaaagaccaagtaatgcggaattatcaatgctttattcaggcatgacagcgaaagaaattgctattcattatggagtcgctttatcgacagttaaaacatggataagattagcaagaaaggaagatgcaacaaatgataaataaaaatcctggcagaaagaaaaaagacgcccctacaccacaagagacgccttttaaaaatgatctttttttcaatcaaaacgataacatatcaaacataaaaagtcaacaagggcatggtcgttcacgaacttgggcgacaattttatatgcagattcagcaaatccaaaatggaaagaagtattagcggaattagcaattccatgttttgttagcccatatcataatcaagatgtgaatccttatggggagcctaagaaaccgcattggcatgtattatttatgtttgatggagtaaaaagcttaaagcaaatacaagatatatctaagcagctttgttctgtagggcaagaaaatgttgcaagtacaagaggatacgcaaggtatttatgccatttagataatccagaaaagacacagtataacatagatgatgtactggcgtttggtggtgctgattatagagatgtcataagtttgccaagtgacaaatatatagttattggtgaaatgatggatttttgcgataaatatgatgtaaaatcattatacgcattgatgaaatacgctagaaaaaataaagaagattggatgcgtgcattgagtgataattgtggatacataatgcgtgaatggttagaatctaggaaatggagtattgaacatgggtttgataaaattgtagatccagaaacaggcgaaatgatattataaatattattttgaatattgtattttataaaaacaatatctgaaatgcgtaagttttttgattgtggattgtttacttatagtcacattgatttgtcaacaagtgaatacttgaaacgtgaaaatgcatatgatataattgtggcaggcaaaaatgagatgatttgcatgtagacataaaaagaaccctcggagcggcaactccgggggttctttgtgcttatttgttgtcacgatctcgatcaagccacttgcagatgaggtggcaaatcacacctgctacgatcgagatgaaaaatgagatgatttcttgcatgtagacaccccctttctgttgccagattgggtgtgacaacaaggagattatatcacaaaatactgattgttagcaagcctcgcagagccccgtcttttgatgcgaagtgtcaaaagtcatacggggttacttttgacaaaagtaacaaaattcagtatgctgtggactaggaggtgtatggtggatgggaagaatatcgatgccgcaaggaaaaggtagtcaattacataataggcggaaatacgaagaaataggcaaagaagttccagagcatataaatacaaaattgacatcacaaaatatcacattggttgatctgaatgtccgtcaagcttatcagtcgatttttgggaaagctgtaactgaatataataacaaacaaaggcgatctgatcggaaaattgaagattattatagttatatacaaaagtcaaagaatggagaaaaactattttacgaagatatattgcaatggggtaaaaaagaggattttcagagcgaagaaacaagagaaaaggctaaaagagcattgctagaatatgtcgatacttttgagcagagaaaccccaatttgaagctgataggtgcttatatacacatggacgaagcgagccctcatttgcatttagattatattccagtagcacatggttataaacgtgggctttctgcaagaaattctctggatagagccatgaaagaaatgggttttattccagaaaaagagagtcgtcaaaacaatgctaccaaaatgtggaaagagaatgaacggtcgtattttggggatatttgtcgaaatatgggactttctgttgaagccgaacggaaagcaaggggaagtctttccgtagaggaatataaggctgcgaaagatgaaatgcttaaaggaattgagaaagagtacgcaaaaaaggaacaagctatcgcagaaatggatcgtataacgtcatatatagctttacaaggcaatgaaactgttaaggc
